(19) United States
(12) Patent Application Publication
(10) Pub. No.: US 2020/0354739 A1
(43) Pub. Date: Nov. 12, 2020

(54) NOVEL RESISTANCE GENES ASSOCIATED WITH DISEASE RESISTANCE IN SOYBEANS

(71) Applicant: Syngenta Participations AG, Basel (CH)

(72) Inventors: Qingli Liu, Research Triangle Park, NC (US); Andrew David Farmer, Sante Fe, NM (US); Xiaoping Tan, Research Triangle Park, NC (US); Thomas Joseph Curley, Jr., Research Triangle Park, NC (US); Becky Welsh Breitinger, Research Triangle Park, NC (US); John Luther Dawson, Research Triangle Park, NC (US); John Daniel Hipskind, Research Triangle Park, NC (US); Robert Arthur Dietrich, Research Triangle Park, NC (US)

(73) Assignee: Syngenta Participations AG, Basel (CH)

(21) Appl. No.: 16/765,717

(22) PCT Filed: Nov. 16, 2018
(86) PCT No.: PCT/US2018/061411

§ 371 Date: May 20, 2020

Related U.S. Application Data
(60) Provisional application No. 62/589,245, filed on Nov. 21, 2017.

(51) Int. Cl. C12N 15/82; C07K 14/415

(52) U.S. Cl. CPC C12N 15/8282; C07K 14/415

(57) ABSTRACT

The present invention relates to methods and compositions for identifying, selecting and/or producing a Disease resistant soybean plant or germplasm using markers, genes and chromosomal intervals derived from Glycine tomentella PI441001, PI441008, PI446958, PI583970, or PI483224. A soybean plant or germplasm that has been identified, selected and/or produced by any of the methods of the present invention is also provided. Disease resistant soybean seeds, plants and germplasms are also provided.

### FIELD OF THE INVENTION

[0001] The present invention relates to compositions and methods for identifying, selecting and producing enhanced disease and/or pathogen resistant plants using novel resistance genes.

### STATEMENT REGARDING ELECTRONIC SUBMISSION OF A SEQUENCE LISTING

[0002] A Sequence Listing in ASCII text format, submitted under 37 C.F.R. § 1.821, entitled “81492-WO-L-ORG-NAT-1-SequenceList_ST25 17.1 MB bytes in size, generated on Nov. 15, 2018 and filed via EFS-Web is provided in lieu of a paper copy. This Sequence Listing is hereby incorporated by reference into the specification for its disclosures.

### BACKGROUND

[0003] Plant pathogens are known to cause considerable damage to important crops, resulting in significant agricultural losses with widespread consequences for both the food supply and other industries that rely on plant materials. As such, there is a long felt need to reduce the incidence and/or impact of agricultural pathogens on crop production.

[0004] Several pathogens have been associated with damage to soybeans, which individually and collectively have the potential to cause significant yield losses in the United States and throughout the world. Exemplary pathogens include, but are not limited to fungi (e.g., genus Phytophthora and Asian Soybean rust Phakopsora pahyrhizi), nematodes (e.g., genus Meloidogyne, particularly, Meloidogyne javanica), and soybean stem canker. Given the significant threat to global food supplies that these pathogens present as well as the time and expense associated with treating soybean crops to prevent yield loss, new methods for producing pathogen resistant soybean cultivars are needed. What is needed is novel resistance genes (herein, “R-Genes”) that can be introduced into commercial soybean plants to control soybean pathogens.

### SUMMARY OF THE INVENTION

[0005] This summary lists several embodiments of the presently disclosed subject matter, and in many cases lists variations and permutations of these embodiments.

[0006] Compositions and methods for identifying, selecting and producing Glycine plants (including wild Glycines (e.g. Glycine tomentella) and Glycine max lines) with enhanced disease resistance are provided. Disease resistant soybean plants and germplasms are also provided. In some embodiments, methods of producing a disease resistant soybean plant are provided.

[0007] In one aspect of the invention there is provided a DNA construct that comprises a promoter that functions in plant cells operably linked to a novel resistance gene (“herein R-Gene). In yet another aspect of the invention there is provided a transgenic plant that contains the DNA construct, wherein the transgenic plant is resistant to soybean pathogens, particularly Asian Soybean Rust.

[0008] In another aspect of the invention is a method of preparing a fertile transgenic plant comprising providing a plant expression cassette comprising an R-Gene and contacting recipient plant cells with the plant expression cassette under conditions permitting the uptake of the plant expression cassette by the recipient cells; and selecting the recipient plant cells that contain the plant expression cassette; and regenerating plants from the selected recipient plant cells; and identifying a fertile transgenic plant that is resistant to soybean pathogens, particularly Asian Soybean Rust.

[0009] In another aspect of the invention there is provided a fertile transgenic plant that comprises a plant expression cassette comprising an R-Gene and wherein the plant is resistant to soybean pathogens, particularly Asian Soybean Rust.

[0010] In another aspect of the invention there is provided a method of controlling ASR in a field comprising the step of planting the seed from a plant comprising an R-gene of the invention.

[0011] Thus, it is an object of the presently disclosed subject matter to provide methods for conveying pathogen resistance into non-resistant soybean germplasm or plant lines.

[0012] Further the presently disclosed subject matter provides novel Glycine max lines comprising in its genome a R-gene that is derived from Glycine tomentella and further confers Asian soybean rust resistance (herein, ‘ASR’) in said novel Glycine max line. Soybean plants and/or germplasms identified, produced or selected by the methods of this invention are also provided, as are any progeny and/or seeds derived from a soybean plant or germplasm identified, produced or selected by these methods.

[0013] As still a further aspect, the invention encompasses transgenic plants comprising a plant cell, plant part, nucleotide sequence, expression cassette, vector and/or R-genes of the invention.

[0014] As a further aspect are seeds that produce the transgenic plants of the invention and seeds produced by the transgenic plants of the invention.

[0015] Also provided are harvested products derived from the transgenic plants of the invention, wherein the harvested product optionally comprises a nucleotide sequence, expression cassette, vector and/or R-gene of the invention. Further provided are processed products derived from the harvested products of the invention, wherein the harvested product optionally comprises a nucleotide sequence, expression cassette, vector and/or R-gene of the invention.

[0016] Still further, the invention provides as an additional aspect a method of producing a transgenic plant with increased resistance to a soybean pathogen. In embodiments, the method comprises introducing into a plant a polynucleotide, expression cassette, or vector of the invention, wherein the R-gene is expressed in the plant, thereby producing a transgenic plant with increased resistance to a soybean pathogen. Optionally, the introducing step comprises: (i) transforming a plant cell with the polynucleotide, expression cassette or vector and regenerating a transgenic plant; or (ii) crossing a first plant comprising the polynucleotide, expression cassette or vector with a second plant. In embodiments, the method further comprises producing a seed from the transgenic plant. In embodiments, the method further comprises obtaining a progeny plant from the transgenic plant, wherein the progeny plant comprises the polynucleotide, the expression cassette or the vector, expresses the R-gene and has increased resistance to a soybean pathogen.

[0017] As yet another aspect, the invention provides a method of producing a transgenic plant with increased resistance to a soybean plant pathogen (e.g., Asian Soybean Rust), the method comprising: (a) planting a seed comprising a polynucleotide, expression cassette or vector of the invention; and (b) growing a transgenic plant from the seed, wherein the transgenic plant comprises the polynucleotide, expression cassette or vector and produces the R-gene and has increased resistance to a soybean pathogen. In embodiments, the method further comprises: (c) harvesting a seed from the transgenic plant of (b), wherein the harvested seed comprises the polynucleotide, expression cassette, vector and/or the R-gene.

[0018] Still further, as another aspect, the invention provides a method of producing a seed. In embodiments, the method comprises: (a) providing a transgenic plant that comprises a polynucleotide, expression cassette or vector of the invention; and (b) harvesting a seed from the transgenic plant of (a), wherein the harvested seed comprises the polynucleotide, expression cassette or vector and/or a R-gene of the invention.

[0019] The invention further contemplates a method of producing a hybrid plant seed. In representative embodiments, the method comprises: (a) crossing a first inbred plant, which is a transgenic plant comprising a polynucleotide, expression cassette or vector of the invention with a different inbred plant, which may or may not comprise a polynucleotide, expression cassette or vector of the invention; and (b) allowing a hybrid seed to form.

[0020] The invention is also drawn to methods of using the polynucleotides of the invention, for example, in DNA constructs or expression cassettes or vectors for transformation and expression in organisms, including plants. The nucleotide or amino acid sequences may be native or synthetic sequences that have been designed for expression in an organism such as a plant.

[0021] In embodiments, the invention provides a method of using a polynucleotide, expression cassette or vector of the invention to produce a transgenic seed, where the transgenic seed grows a transgenic plant with increased resistance to a soybean pathogen.

[0022] The foregoing and other objects and aspects of the present invention are explained in detail in the drawings and specification set forth below.

### BRIEF DESCRIPTION OF THE DRAWINGS

[0023] FIG. 1. qRT-PCR measurement of fungal b-tubulin of differential host panel. The measurement correlate well with the phenotypic ratings.

[0024] FIG. 2. Formula used to process the qRT-PCR raw reads.

[0025] FIG. 3. Normalized fungal biomass with different constructs using known resistance gene CcRpp1 to validate the split leaf system FIG. 4. Alternate formula used to process the qRT-PCR raw reads.

[0026] FIG. 5. Split leaf assay validation using CcRpp1, and a construct comprising SEQ ID NO: X showed significant disease reduction compared to the check.

[0027] FIG. 6. Split leaf assay validation of SEQ ID NO: 6 showing significant disease reduction compared to check.

[0028] FIG. 7. Stable transformation (T1 events) results showing three events carrying SEQ ID NO: 21 delivering about 80% disease control. The bar is graphed as average of fungal b-tubulin transcripts

[0029] FIG. 8. Stable transformation (T0 events) results showing two events carrying SEQ ID NO: 27 conferring resistance to soybean rust.

[0030] FIG. 9. Foliar symptoms correlating to qRT assay.

### BRIEF DESCRIPTION OF THE SEQUENCE LISTING

[0031] SEQ ID NOs: 1 & 2 are chromosomal intervals derived from Glycine tomentella line accession PI441001 referred to herein as “Scaffold 46840” and “Scaffold 49652” respectively. Scaffold 49652 has been mapped to G. tomentella chromosome 5 and Scaffold 46840 has been mapped to G. tomentella chromosome 5. SEQ ID NO. 3 is a chromosomal interval derived from Glycine tomentella line accession PI 483224 referred to herein as “Scaffold 002687F”. Scaffold 002687F has been mapped to G. tomentella chromosome 5. SEQ ID NO. 4 is a chromosomal interval derived from Glycine tomentella line accession PI 583970 referred to herein as “Scaffold 001084F”. Scaffold 001084F has been mapped to G. tomentella chromosome 5. SEQ ID NO: 5 is a chromosomal interval derived from Glycine tomentella line accession PI583970 herein referred to “Contig 000819F”. Contig (000819F has been mapped to G. tomentella chromosome 5. Genetic population mapping studies for PI441001, PI483224 and PI 583970 indicate that Glycine tomentella Chromosome 5 contains chromosomal intervals highly associated with ASR resistance (e.g. as corresponding to SEQ ID NOs: 1-5). Further data, also indicates that Glycine tomentella accessions PI446958, PI499939, PI505220, PI499933, PI441008, PI505256, PI446961 and PI483224 can be used as a source for said chromosomal intervals or genes corresponding to SEQ ID NOs 1-5. These chromosomal intervals or portions thereof may be introduced (i.e. introgressed through use of embryo rescue & marker assisted breeding (MAB)) into Glycine max lines to create Glycine max lines resistant to various diseases such as ASR. Single nucleotide polymorphisms (SNP) within SEQ ID NOs 1-5 that are associated with ASR resistance are described in PCT Application No. PCT/US2017/036712, published as WO 2017/222827, incorporated herein by reference in its entirety.

[0032] Further research into the intervals led to the discovery of causative genes and associated native promoters and terminator sequences were identified from the above interval(s) located or corresponding to on Glycine tomentella Chromosome 5.

[0033] SEQ ID NO: 6 is a soy rust resistance gene from PI441001 encoding a protein containing Toll/Interleukin-1 receptor (TIR), nucleotide-binding site (NBS), leucine rich-repeat (LRR), and WKRY domains syntenic to Glyma.05G165800 (Soy_william82_v2) (Herein, a “TNLW” R-gene motif); associated native promoter comprises SEQ ID NO: 7 and terminator sequence comprises SEQ ID NO: 8. SEQ ID NO: 6 encodes the protein of SEQ ID NO: 47.

[0034] SEQ ID NO: 9 is a soy rust resistance candidate gene from PI441001 that encodes a protein containing coiled-coiled (CC), nucleotide-binding site (NBS), and leucine rich repeat (LRR) domains. The gene is syntenic to Glyma.05G165600 (Soy_william82_v2) (Herein, a “CNL” R-gene motif); associated native promoter comprises SEQ ID NO: 10 and terminator sequence comprises SEQ ID NO: 11. SEQ ID NO: 9 encodes the protein of SEQ ID NO: 48.

[0035] SEQ ID NO: 12 is a soy rust resistance candidate gene from PI583970 that encodes a protein having a CNL R-gene motif; associated native promoter comprises SEQ ID NO: 13 and terminator sequence comprises SEQ ID NO: 14. SEQ ID NO. 12 encodes the protein of SEQ ID NO: 42.

[0036] SEQ ID NO: 15 is a soy rust resistance candidate gene from PI583970 that encodes a protein having a CNL R-gene motif; associated promoter used to validate comprises SEQ ID NO: 16 and terminator sequence comprises SEQ ID NO: 17. SEQ ID NO. 15 encodes the protein of SEQ ID NO: 43.

[0037] SEQ ID NO: 18 is a soy rust resistance candidate gene from PI583970 that encodes a protein having a CNL R-gene motif; associated promoter used to validate comprises SEQ ID NO: 19 and terminator sequence comprises SEQ ID NO: 20. SEQ ID NO. 18 encodes the protein of SEQ ID NO: 49.

[0038] SEQ ID NO: 21 is a soy rust resistance candidate gene from PI446958 that encodes a protein having a CNL R-gene motif; associated promoter used to validate comprises SEQ ID NO: 22 and terminator sequence comprises SEQ ID NO: 23. SEQ ID NO: 21 encodes the protein of SEQ ID NO: 44.

[0039] SEQ ID NO: 24 is a soy rust resistance candidate gene from PI446958 that encodes a protein having a CNL R-gene motif; associated native promoter comprises SEQ ID NO: 25 and terminator sequence comprises SEQ ID NO: 26. SEQ ID NO: 24 encodes the protein of SEQ ID NO: 45.

[0040] SEQ ID NO: 27 is a soy rust resistance candidate gene from PI446958 that encodes a protein having a CNL R-gene motif; associated promoter used to validate comprises SEQ ID NO: 28 and terminator sequence comprises SEQ ID NO: 29. SEQ ID NO: 27 encodes the protein of SEQ ID NO: 46.

[0041] SEQ ID NO: 30 is a soy rust resistance candidate gene from PI583970 that encodes a protein having a TNLW R-gene motif; associated native promoter comprises SEQ ID NO: 31 and terminator sequence comprises SEQ ID NO: 32. SEQ ID NO: 30 encodes the protein of SEQ ID NO: 50.

[0042] Further intervals have been discovered in other Glycine tomentella lines as depicted Table 1 below that are associated with ASR resistance and correspond to the intervals described above having/comprising SEQ ID NOs 1-5 and also located on chromosome 5. Interval mapping indicates that ASR resistance can be found in both T1 and T2 Glycine tomentella lines. Further, it is contemplated that any of the source lines listed in Table 1 can be used to introduce ASR resistance into elite Soybean plants either by way of plant introgression through embryo rescue or via transgenic expression of genes encoding a protein having a CNL or TNLW R-gene motif or a gene having between 70-100% homology to any of SEQ ID NOs: 6, 9, 12, 15, 18, 21, 24, 27, or 30. Contig/Scaffolds 001082F, 000221F, 000342F, 003716F, 001879F, 001273F, 000866F, 000819F and 49562 are depicted in SEQ ID NOs: 33, 34, 35, 36, 37, 38, 49, 40, and 41 respectively. It is contemplated that homologous sequences with functional ASR resistance genes related to the R-Genes as depicted in SEQ ID NOs: 6, 9, 12, 15, 18, 21, 24, 27 and 30 can be located in the intervals and associated sequences of Table 1.

TABLE 1
Listing of others sources and scaffolds found to comprise intervals
associated with increased resistance to Asian Soybean Rust.

| Genome | | Contig/ | | |
|---|---|---|---|---|
| type | Line | Scaffold | begin | end |
| T1 | PI505220 | s49652 | 47,538 | 2,464,073 |
| T1 | PI499933 | s49652 | 42,441 | 2,481,008 |
| T1 | PI441008 | 000207F | 1,000,000 | 1,400,000 |
| T1 | PI441008 | 000819F | Whole Contig | Whole Contig |
| T1 | PI441008 | 000866F | Whole Contig | Whole Contig |
| T1 | PI441008 | 001273F | Whole Contig | Whole Contig |
| T1 | PI441008 | 001879F | Whole Contig | Whole Contig |
| T1 | PI441008 | 003716F | Whole Contig | Whole Contig |
| T2 | PI449658 | 000342F | 108,327 | End of contig |
| T2 | PI449658 | 000221F | Whole Contig | Whole Contig |
| T2 | PI449658 | 001082F | Beginning of | 629,163 |
| | | | Contig | |
| T2 | PI446961 | 000342F | Whole Contig | Whole Contig |
| T2 | PI446961 | 000221F | Whole Contig | Whole Contig |
| T2 | PI446961 | 001082F | Beginning of | 369,453 |
| | | | Contig | |
| T2 | PI505256 | 000342F | 203,123 | End of contig |
| T2 | PI505256 | 000221F | Whole Contig | Whole Contig |
| T2 | PI505256 | 001082F | Beginning of | 326,515 |
| | | | Contig | |

### DETAILED DESCRIPTION OF THE INVENTION

[0043] The presently disclosed subject matter relates to compositions and methods for introducing novel resistance genes (herein, “R-Genes”) into commercial soybean plants to control soybean pathogens. The methods involve transforming organisms with nucleotide sequences encoding the R-genes of the invention. The nucleotide sequences of the invention are useful for preparing plants that show increased resistance to soybean pathogens, particularly Asian Soybean Rust (herein, “ASR”). Thus, transformed plants, plant cells, plant tissues and seeds are provided. Compositions include nucleic acids and proteins relating to soybean pathogen resistant plants as well as transformed plants, plant tissues and seeds. Nucleotide sequences of the R-genes and the amino acid sequences of the proteins encoded thereby are disclosed. The sequences find use in the construction of expression vectors for subsequent transformation into plants of interest, as probes for the isolation of other R-genes, and the like.

[0044] It is possible to produce soybean pathogen resistant plants by inserting into the plant genome a DNA molecule that provides for resistance (Cook et al, 2012 for SON resistance; Kawashima et al., 2016 for soy rust resistance from pigeon pea).

[0045] This description is not intended to be a detailed catalog of all the different ways in which the invention may be implemented, or all the features that may be added to the instant invention. For example, features illustrated with respect to one embodiment may be incorporated into other embodiments, and features illustrated with respect to a particular embodiment may be deleted from that embodiment. Thus, the invention contemplates that in some embodiments of the invention, any feature or combination of features set forth herein can be excluded or omitted. In addition, numerous variations and additions to the various embodiments suggested herein will be apparent to those skilled in the art in light of the instant disclosure, which do not depart from the instant invention. Hence, the following descriptions are intended to illustrate some particular embodiments of the invention, and not to exhaustively specify all permutations, combinations and variations thereof.

[0046] All references listed below, as well as all references cited in the instant disclosure, including but not limited to all patents, patent applications and publications thereof, scientific journal articles, and database entries (e.g., GENBANK® database entries and all annotations available therein) are incorporated herein by reference in their entireties to the extent that they supplement, explain, provide a background for, or teach methodology, techniques, and/or compositions employed herein.

[0047] Nucleotide sequences provided herein are presented in the 5′ to 3′ direction, from left to right and are presented using the standard code for representing nucleotide bases as set forth in 37 CFR §§ 1.821-1.825 and the World Intellectual Property Organization (WIPO) Standard ST.25, for example: adenine (A), cytosine (C), thymine (T), and guanine (G).

[0048] Amino acids are likewise indicated using the WIPO Standard ST.25, for example: alanine (Ala; A), arginine (Arg; R), asparagine (Asn; N), aspartic acid (Asp; D), cysteine (Cys; C), glutamine (Gln; Q), glutamic acid (Glu; E), glycine (Gly; G), histidine (His; H), isoleucine (Ile; 1), leucine (Leu; L), lysine (Lys; K), methionine (Met; M), phenylalanine (Phe; F), proline (Pro; P), serine (Ser; S), threonine (Thr; T), tryptophan (Trp; W), tyrosine (Tyr; Y), and valine (Val; V).

### Definitions

[0049] Unless defined otherwise, all technical and scientific terms used herein have the same meaning as commonly understood to one of ordinary skill in the art to which the presently disclosed subject matter belongs.

[0050] Although the following terms are believed to be well understood by one of ordinary skill in the art, the following definitions are set forth to facilitate understanding of the presently disclosed subject matter.

[0051] As used in the description of the invention and the appended claims, the singular forms “a,” “an” and “the” are intended to include the plural forms as well, unless the context clearly indicates otherwise.

[0052] As used herein, “and/or” refers to and encompasses any and all possible combinations of one or more of the associated listed items, as well as the lack of combinations when interpreted in the alternative (“or”).

[0053] The term “about,” as used herein when referring to a measurable value such as a dosage or time period and the like, is meant to encompass variations of ±20%, ±10%, ±5%, ±1%, ±0.5%, or even ±0.1% of the specified amount. As used herein, phrases such as “between about X and Y” mean “between about X and about Y” and phrases such as “from about X to Y” mean “from about X to about Y.”

[0054] As used herein, phrases such as “between about X and Y”, “between about X and about Y”, “from X to Y” and “from about X to about Y” (and similar phrases) should be interpreted to include X and Y, unless the context indicates otherwise.

[0055] A “coding sequence” is a nucleic acid sequence that is transcribed into RNA such as mRNA, rRNA, tRNA, snRNA, sense RNA or antisense RNA. In embodiments, the RNA is then translated to produce a protein.

[0056] As used herein, a “codon optimized” nucleotide sequence means a nucleotide sequence of a recombinant, transgenic, or synthetic polynucleotide wherein the codons are chosen to reflect the particular codon bias that a host cell or organism may have.

[0057] This is typically done in such a way so as to preserve the amino acid sequence of the polypeptide encoded by the codon optimized nucleotide sequence. In certain embodiments, a nucleotide sequence is codon optimized for the cell (e.g., an animal, plant, fungal or bacterial cell) in which the construct is to be expressed. For example, a construct to be expressed in a plant cell can have all or parts of its sequence codon optimized for expression in a plant. See, for example, U.S. Pat. No. 6,121,014. In embodiments, the polynucleotides of the invention are codon-optimized for expression in a plant cell (e.g., a dicot cell or a monocot cell) or bacterial cell.

[0058] The term “comprise”, “comprises” or “comprising,” when used in this specification, indicates the presence of the stated features, integers, steps, operations, elements, or components, but does not preclude the presence or addition of one or more other features, integers, steps, operations, elements, components, and/or groups thereof.

[0059] As used herein, the transitional phrase “consisting essentially of” (and grammatical variants) means that the scope of a claim is to be interpreted to encompass the specified materials or steps recited in the claim “and those that do not materially alter the basic and novel characteristic(s)” of the claimed invention. Thus, the term “consisting essentially of” when used in a claim of this invention is not intended to be interpreted to be equivalent to “comprising.”

[0060] “Expression cassette” as used herein means a nucleic acid molecule capable of directing expression of at least one polynucleotide of interest, such as a R-gene polynucleotide that encodes protein of the invention, in an appropriate host cell, comprising a promoter operably linked to the polynucleotide of interest which is operably linked to a termination signal. An “expression cassette” also typically comprises additional polynucleotides to facilitate proper translation of the polynucleotide of interest. The expression cassette may also comprise other polynucleotides not related to the expression of a polynucleotide of interest but which are present due to convenient restriction sites for removal of the cassette from an expression vector. In embodiments, at least one of the components in the expression cassette may be heterologous (i.e., foreign) with respect to at least one of the other components (e.g., a heterologous promoter operatively associated with a polynucleotide of interest). The expression cassette may also be one that is naturally occurring but has been obtained in a recombinant form useful for heterologous expression. Typically, however, the expression cassette is heterologous with respect to the host, i.e., the expression cassette (or even the polynucleotide of interest) does not occur naturally in the host cell and has been introduced into the host cell or an ancestor cell thereof by a transformation process or a breeding process. The expression of the polynucleotide(s) of interest in the expression cassette is generally under the control of a promoter. In the case of a multicellular organism, such as a plant, the promoter can also be specific or preferential to a particular tissue, or organ, or stage of development (as described in more detail herein). An expression cassette, or fragment thereof, can also be referred to as “inserted polynucleotide” or “insertion polynucleotide” when transformed into a plant.

[0061] A “gene” is defined herein as a hereditary unit comprising one or more polynucleotides that occupies a specific location on a chromosome or plasmid and that contains the genetic instruction for a particular characteristic or trait in an organism.

[0062] The term “introduced” as used herein, in connection to a plant, means accomplished by any manner including but not limited to; introgression, transgenic, Clustered Regularly Interspaced Short Palindromic Repeats modification (CRISPR), Transcription activator-like effector nucleases (TALENs) (Feng et al. 2013, Joung & Sander 2013), meganucleases, or zinc finger nucleases (ZFNs).

[0063] As used herein, the term “wild glycine” refers to a perennial Glycine plant, for example any one of G. canescens, G. argyrea, G. clandestine, G. latrobeana, G. albicans, G. aphyonota, G. arenaria, G. curvata, G. cyrtoloba, G. dolichocarpa, G. falcate, G. gracei, G. hirticaulis, G. lactovirens, G. latifolia, G. microphylla, G. montis-douglas, G. peratosa, G. pescadrensis, G. pindanica, G. pullenii, G. rubiginosa, G. stenophita, G. syndetika, or G. tomentella.

[0064] As used herein, the term “allele” refers to one of two or more different nucleotides or nucleotide sequences that occur at a specific locus.

[0065] A marker is “associated with” a trait when it is linked to it and when the presence of the marker is an indicator of whether and/or to what extent the desired trait or trait form will occur in a plant/germplasm comprising the marker. Similarly, a marker is “associated with” an allele when it is linked to it and when the presence of the marker is an indicator of whether the allele is present in a plant/germplasm comprising the marker. For example, “a marker associated with enhanced pathogen resistance” refers to a marker whose presence or absence can be used to predict whether and/or to what extent a plant will display a pathogen resistant phenotype (e.g. any favorable SNP allele as described in Tables 1-5 are “associated with” ASR resistance in a soybean plant).

[0066] As used herein, the terms “backcross” and “backcrossing” refer to the process whereby a progeny plant is repeatedly crossed back to one of its parents. In a backcrossing scheme, the “donor” parent refers to the parental plant with the desired gene or locus to be introgressed. The “recipient” parent (used one or more times) or “recurrent” parent (used two or more times) refers to the parental plant into which the gene or locus is being introgressed. For example, see Ragot, M. et al. Marker-assisted Backcrossing: A Practical Example, in TECHNIQUES ET UTILISATIONS DES MARQUEURS MOLECULAIRES LES COLLOQUES, Vol. 72, pp. 45-56 (1995); and Openshaw et al., Marker-assisted Selection in Backcross Breeding, in PROCEEDINGS OF THE SYMPOSIUM “ANALYSIS OF MOLECULAR MARKER DATA,” pp. 41-53 (1994). The initial cross gives rise to the F1 generation. The term “BC1” refers to the second use of the recurrent parent, “BC2” refers to the third use of the recurrent parent, and so on.

[0067] A centimorgan (“cM”) is a unit of measure of recombination frequency. One cM is equal to a 1% chance that a marker at one genetic locus will be separated from a marker at a second locus due to crossing over in a single generation.

[0068] As used herein, the term “chromosomal interval defined by and including,” used in reference to particular loci and/or alleles, refers to a chromosomal interval delimited by and encompassing the stated loci/alleles.

[0069] As used herein, the terms “cross” or “crossed” refer to the fusion of gametes via pollination to produce progeny (e.g., cells, seeds or plants). The term encompasses both sexual crosses (the pollination of one plant by another) and selfing (self-pollination, e.g., when the pollen and ovule are from the same plant). The term “crossing” refers to the act of fusing gametes via pollination to produce progeny.

[0070] As used herein, the terms “cultivar” and “variety” refer to a group of similar plants that by structural or genetic features and/or performance can be distinguished from other varieties within the same species.

[0071] As used herein, the terms “desired allele”, “favorable allele” and “allele of interest” are used interchangeably to refer to an allele associated with a desired trait (e.g. ASR resistance).

[0072] As used herein, the terms “enhanced pathogen resistance” or “enhanced disease resistance” refers to an improvement, enhancement, or increase in a plant's ability to endure and/or thrive despite being infected with a disease (e.g. Asian soybean rust) as compared to one or more control plants (e.g., one or both of the parents, or a plant lacking a marker associated with enhanced pathogen resistance to respective pathogen/disease). Enhanced disease resistance includes any mechanism (other than whole-plant immunity or resistance) that reduces the expression of symptoms indicative of infection for a respective disease such as Asian soybean rust, soybean cyst nematode, Pytophthora, etc.

[0073] An “elite line” or “elite strain” is an agronomically superior line that has resulted from many cycles of breeding and selection for superior agronomic performance. Numerous elite lines are available and known to those of skill in the art of soybean breeding. An “elite population” is an assortment of elite individuals or lines that can be used to represent the state of the art in terms of agronomically superior genotypes of a given crop species, such as soybean. Similarly, an “elite germplasm” or elite strain of germplasm is an agronomically superior germplasm, typically derived from and/or capable of giving rise to a plant with superior agronomic performance, such as an existing or newly developed elite line of soybean.

[0074] An “elite” plant is any plant from an elite line, such that an elite plant is a representative plant from an elite variety. Non-limiting examples of elite soybean varieties that are commercially available to farmers or soybean breeders include: AG00802, A0868, AG0902, A1923, AG2403, A2824, A3704, A4324, A5404, AG5903, AG6202 AG0934; AG1435; AG2031; AG2035; AG2433; AG2733; AG2933; AG3334; AG3832; AG4135; AG4632; AG4934; AG5831; AG6534; and AG7231 (Asgrow Seeds, Des Moines, Iowa, USA); BPR0144RR, BPR 4077NRR and BPR 4390NRR (Bio Plant Research, Camp Point, Ill., USA); DKB17-51 and DKB37-51 (DeKalb Genetics, DeKalb, Ill., USA); DP 4546 RR, and DP 7870 RR (Delta & Pine Land Company, Lubbock, Tex., USA); JG 03R501, JG 32R606C ADD and JG 55R503C (JGL Inc., Greencastle, Ind., USA); NKS 13-K2 (NK Division of Syngenta Seeds, Golden Valley, Minn., USA); 90M01, 91M30, 92M33, 93M11, 94M30, 95M30, 97652, P008T22R2; P16T17R2; P22T69R; P25T51R; P34T07R2; P35T58R; P39T67R; P47T36R; P46T21R; and P56T03R2 (Pioneer Hi-Bred International, Johnston, Iowa, USA); 5G4771NRR and SG5161NRR/STS (Soygenetics, LLC, Lafayette, Ind., USA); 500-K5, S11-L2, S28-Y2, S43-B1, S53-A1, 576-L9, S78-G6, 50009-M2; S007-Y4; 504-D3; S14-A6; S20-T6; S21-M7; S26-P3; S28-N6; S30-V6; S35-C3; S36-Y6; S39-C4; S47-K5; S48-D9; S52-Y2; S58-Z4; S67-R6; S73-S8; and S78-G6 (Syngenta Seeds, Henderson, Ky., USA); Richer (Northstar Seed Ltd. Alberta, CA); 14RD62 (Stine Seed Co. Ia., USA); or Armor 4744 (Armor Seed, LLC, Ar., USA).

[0075] The terms “agronomically elite” as used herein, means a genotype that has a culmination of many distinguishable traits such as emergence, vigor, vegetative vigor, disease resistance, seed set, standability, yield and threshability which allows a producer to harvest a product of commercial significance.

[0076] As used herein, the term “commercially significant yield” or “agronomically acceptable yield” refers to a grain yield of at least 100% of a commercial check variety such as AG2703 or DKB23-51.

[0077] A “native” or “wild type” nucleic acid, nucleotide sequence, polypeptide or amino acid sequence refers to a naturally occurring or endogenous nucleic acid, nucleotide sequence, polypeptide or amino acid sequence. Thus, for example, a “wild type mRNA” is an mRNA that is naturally occurring in or endogenous to the organism.

[0078] The terms “nucleic acid,” “nucleic acid molecule,” “nucleotide sequence,” “oligonucleotide” and “polynucleotide” are used interchangeably herein, unless the context indicates otherwise, and refer to a heteropolymer of nucleotides. These terms include without limitation DNA and RNA molecules, including cDNA, genomic DNA, synthetic (e.g., chemically synthesized) DNA and RNA, plasmid DNA, mRNA, antisense RNA, and RNA/DNA hybrids, any of which can be linear or branched, single stranded or double stranded, or a combination thereof. When dsRNA is produced synthetically, less common bases, such as inosine, 5-methylcytosine, 6-methyladenine, hypoxanthine and others can also be used for antisense, dsRNA, and ribozyme pairing. For example, polynucleotides that contain C-5 propyne analogues of uridine and cytidine have been shown to bind RNA with high affinity and to be potent antisense inhibitors of gene expression. Other modifications, such as modification to the phosphodiester backbone, or the 2′-hydroxy in the ribose sugar group of the RNA can also be made. In embodiments, the “nucleic acid,” “nucleic acid molecule,”, “nucleotide sequence,”, “oligonucleotide” or “polynucleotide” refer to DNA.

[0079] By “operably linked” or “operably associated” as used herein, it is meant that the indicated elements are functionally related to each other, and are also generally physically related. Thus, the term “operably linked” or “operably associated” as used herein, refers to nucleotide sequences on a single nucleic acid molecule that are functionally associated. Thus, a first nucleotide sequence that is operably linked to a second nucleotide sequence, means a situation when the first nucleotide sequence is placed in a functional relationship with the second nucleotide sequence. For instance, a promoter is operably associated with a nucleotide sequence if the promoter effects the transcription or expression of said nucleotide sequence. Those skilled in the art will appreciate that the control sequences (e.g., promoter) need not be contiguous with the nucleotide sequence to which it is operably associated, as long as the control sequences function to direct the expression thereof. Thus, for example, intervening untranslated, yet transcribed, sequences can be present between a promoter and a nucleotide sequence, and the promoter can still be considered “operably linked” to or “operatively associated” with the nucleotide sequence.

[0080] As used herein, the terms “disease tolerance” and “disease resistant” refer to a plant's ability to endure and/or thrive despite being infected with a respective disease. When used in reference to germplasm, the terms refer to the ability of a plant that arises from that germplasm to endure and/or thrive despite being infected with a respective disease. In some embodiments, infected Disease resistant soybean plants may yield as well (or nearly as well) as uninfected soybean plants. In general, a plant or germplasm is labeled as “Disease resistant” if it displays “enhanced pathogen resistance.”

[0081] As used herein, the term “endogenous” refers to materials originating from within an organism or cell. “Exogenous” refers to materials originating from outside of an organism or cell. This typically applies to nucleic acid molecules used in producing transformed or transgenic host cells and plants.

[0082] As used herein, the terms “exotic,” “exotic line” and “exotic germplasm” refer to any plant, line or germplasm that is not elite. In general, exotic plants/germplasms are not derived from any known elite plant or germplasm, but rather are selected to introduce one or more desired genetic elements into a breeding program (e.g., to introduce novel alleles into a breeding program).

[0083] As used herein, a “genetic map” is a description of genetic linkage relationships among loci on one or more chromosomes within a given species, generally depicted in a diagrammatic or tabular form. For each genetic map, distances between loci are measured by the recombination frequencies between them. Recombinations between loci can be detected using a variety of markers. A genetic map is a product of the mapping population, types of markers used, and the polymorphic potential of each marker between different populations. The order and genetic distances between loci can differ from one genetic map to another.

[0084] As used herein, the term “genome” as it applies to plant cells encompasses not only chromosomal DNA found within the nucleus, but organelle DNA found within subcellular components of the cell. The term “gene” refers to polynucleic acids that comprise chromosomal DNA, plasmid DNA, cDNA, an artificial DNA polynucleotide, or other DNA that is transcribed into an RNA molecule, wherein the RNA may encode a peptide, polypeptide, or protein, and the genetic elements flanking the coding sequence that are involved in the regulation of expression of the mRNA or polypeptide of the present invention. A “fragment” of a gene is a portion of a full-length polynucleic acid molecule that is of at least a minimum length capable of transcription into a RNA, translation into a peptide, or useful as a probe or primer in a DNA detection method.

[0085] As used herein, the term “genotype” refers to the genetic constitution of an individual (or group of individuals) at one or more genetic loci, as contrasted with the observable and/or detectable and/or manifested trait (the phenotype). Genotype is defined by the allele(s) of one or more known loci that the individual has inherited from its parents. The term genotype can be used to refer to an individual's genetic constitution at a single locus, at multiple loci, or more generally, the term genotype can be used to refer to an individual's genetic make-up for all the genes in its genome. Genotypes can be indirectly characterized, e.g., using markers and/or directly characterized by nucleic acid sequencing.

[0086] As used herein, the term “germplasm” refers to genetic material of or from an individual (e.g., a plant), a group of individuals (e.g., a plant line, variety or family), or a clone derived from a line, variety, species, or culture. The germplasm can be part of an organism or cell, or can be separate from the organism or cell. In general, germplasm provides genetic material with a specific molecular makeup that provides a physical foundation for some or all of the hereditary qualities of an organism or cell culture. As used herein, germplasm may refer to seeds, cells (including protoplasts and calli) or tissues from which new plants may be grown, as well as plant parts that can be cultured into a whole plant (e.g., stems, buds, roots, leaves, etc.).

[0087] As used herein, a “Heterologous DNA” sequence refers to a polynucleotide sequence that originates from a foreign source or species or, if from the same source, is modified from its original form.

[0088] As used herein, a “Homologous DNA” refers to DNA from the same source as that of the recipient cell.

[0089] As used herein, the term “hybrid” refers to a seed and/or plant produced when at least two genetically dissimilar parents are crossed.

[0090] As used herein, the term “Identity” refers to the degree of similarity between two polynucleic acid or protein sequences. An alignment of the two sequences is performed by a suitable algorithm. One widely used and accepted computer program for performing sequence alignments is CLUSTALW v1.6 (Thompson, et al. Nucl. Acids Res., 22: 4673-4680, 1994), although others are commonly used. The number of matching bases or amino acids is divided by the total number of bases or amino acids, and multiplied by 100 to obtain a percent identity. For example, if two 580 base pair sequences had 145 matched bases, they would be 25 percent identical. If the two compared sequences are of different lengths, the number of matches is divided by the shorter of the two lengths. For example, if there are 100 matched amino acids between 200 and 400 amino acid proteins, they are 50 percent identical with respect to the shorter sequence. If the shorter sequence is less than 150 bases or 50 amino acids in length, the number of matches are divided by 150 (for nucleic acid bases) or 50 (for amino acids), and multiplied by 100 to obtain a percent identity. In addition to identity positions, consensus positions are also commonly scored. Consensus amino acids are those known to have similar amino acid properties such as charge, size, polarity, and aromaticity.

[0091] As used herein, the term “inbred” refers to a substantially homozygous plant or variety. The term may refer to a plant or variety that is substantially homozygous throughout the entire genome or that is substantially homozygous with respect to a portion of the genome that is of particular interest.

[0092] As used herein, the term “indel” refers to an insertion or deletion in a pair of nucleotide sequences, wherein a first sequence may be referred to as having an insertion relative to a second sequence or the second sequence may be referred to as having a deletion relative to the first sequence.

[0093] As used herein, the terms “introgression,” “introgressing” and “introgressed” refer to both the natural and artificial transmission of a desired allele or combination of desired alleles of a genetic locus or genetic loci from one genetic background to another. For example, a desired allele at a specified locus can be transmitted to at least one progeny via a sexual cross between two parents of the same species, where at least one of the parents has the desired allele in its genome. Alternatively, for example, transmission of an allele can occur by recombination between two donor genomes, e.g., in a fused protoplast, where at least one of the donor protoplasts has the desired allele in its genome. The desired allele may be a selected allele of a marker, a QTL, a transgene, or the like. Offspring comprising the desired allele can be repeatedly backcrossed to a line having a desired genetic background and selected for the desired allele, with the result being that the desired allele becomes fixed in the desired genetic background. For example, a marker associated with enhanced ASR tolerance may be introgressed from a donor into a recurrent parent that is not disease resistant. The resulting offspring could then be repeatedly backcrossed and selected until the progeny possess the ASR tolerance allele(s) in the recurrent parent background.

[0094] As used herein, an “isolated” nucleic acid molecule is substantially separated away from other nucleic acid sequences with which the nucleic acid is normally associated, such as, from the chromosomal or extrachromosomal DNA of a cell in which the nucleic acid naturally occurs. A nucleic acid molecule is an isolated nucleic acid molecule when it comprises a transgene or part of a transgene present in the genome of another organism. The term also embraces nucleic acids that are biochemically purified so as to substantially remove contaminating nucleic acids and other cellular components. The term “transgene” refers to any polynucleic acid molecule normative to a cell or organism transformed into the cell or organism. “Transgene” also encompasses the component parts of a native plant gene modified by insertion of a normative polynucleic acid molecule by directed recombination or site specific mutation.

[0095] A polypeptide is “isolated” if it has been separated from the cellular components (nucleic acids, lipids, carbohydrates, and other polypeptides) that naturally accompany it or that is chemically synthesized or recombinant. A polypeptide molecule is an isolated polypeptide molecule when it is expressed from a transgene in another organism. A monomeric polypeptide is isolated when at least 60% by weight of a sample is composed of the polypeptide, preferably 90% or more, more preferably 95% or more, and most preferably more than 99%. Protein purity or homogeneity is indicated, for example, by polyacrylamide gel electrophoresis of a protein sample, followed by visualization of a single polypeptide band upon staining the polyacrylamide gel; high pressure liquid chromatography; or other conventional methods. Proteins can be purified by any of the means known in the art, for example as described in Guide to Protein Purification, ed. Deutscher, Meth. Enzymol. 185, Academic Press, San Diego, 1990; and Scopes, Protein Purification: Principles and Practice, Springer Verlag, New York, 1982.

[0096] Using well-known methods, the skilled artisan can readily produce nucleotide and amino acid sequence variants of genes and proteins that provide a modified gene product. Chemical synthesis of nucleic acids can be performed, for example, on automated oligonucleotide synthesizers. Such variants preferably do not change the reading frame of the protein-coding region of the nucleic acid. The present invention also encompasses fragments of a protein that lacks at least one residue of a full-length protein, but that substantially maintains activity of the protein.

[0097] A “locus” is a position on a chromosome where a gene or marker or allele is located. In some embodiments, a locus may encompass one or more nucleotides.

[0098] A “non-naturally occurring variety of soybean” is any variety of soybean that does not naturally exist in nature. A “non-naturally occurring variety of soybean” may be produced by any method known in the art, including, but not limited to, transforming a soybean plant or germplasm, transfecting a soybean plant or germplasm and crossing a naturally occurring variety of soybean with a non-naturally occurring variety of soybean. In some embodiments, a “non-naturally occurring variety of soybean” may comprise one of more heterologous nucleotide sequences. In some embodiments, a “non-naturally occurring variety of soybean” may comprise one or more non-naturally occurring copies of a naturally occurring nucleotide sequence (i.e., extraneous copies of a gene that naturally occurs in soybean). In some embodiments, a “non-naturally occurring variety of soybean” may comprise a non-natural combination of two or more naturally occurring nucleotide sequences (i.e., two or more naturally occurring genes that do not naturally occur in the same soybean, for instance genes not found in Glycine max lines).

[0099] As used herein, the terms “phenotype,” “phenotypic trait” or “trait” refer to one or more traits and/or manifestations of an organism. The phenotype can be a manifestation that is observable to the naked eye, or by any other means of evaluation known in the art, e.g., microscopy, biochemical analysis, or an electromechanical assay. In some cases, a phenotype or trait is directly controlled by a single gene or genetic locus, i.e., a “single gene trait.” In other cases, a phenotype or trait is the result of several genes. It is noted that, as used herein, the term “disease resistant phenotype” takes into account environmental conditions that might affect the respective disease such that the effect is real and reproducible.

[0100] As used herein, the term “plant” may refer to a whole plant, any part thereof, or a cell or tissue culture derived from a plant. Thus, the term “plant” can refer to any of: whole plants, plant components or organs (e.g., roots, stems, leaves, buds, flowers, pods, etc.), plant tissues, seeds and/or plant cells. A plant cell is a cell of a plant, taken from a plant, or derived through culture from a cell taken from a plant. Thus, the term “soybean plant” may refer to a whole soybean plant, one or more parts of a soybean plant (e.g., roots, root tips, stems, leaves, buds, flowers, pods, seeds, cotyledons, etc.), soybean plant cells, soybean plant protoplasts and/or soybean plant calli.

[0101] A “plant cell” is a structural and physiological unit of a plant, comprising a protoplast and a cell wall. The plant cell may be in the form of an isolated single cell or a cultured cell, or as a part of a higher organized unit such as, for example, plant tissue, a plant organ, or a whole plant. In embodiments, the plant cell is non-propagating and/or cannot regenerate a whole plant.

[0102] A “plant cell culture” means a culture of plant units such as, for example, protoplasts, cell culture cells, cells in plant tissues, pollen, pollen tubes, ovules, embryo sacs, zygotes and embryos at various stages of development.

[0103] “Plant material” refers to leaves, stems, roots, flowers or flower parts, fruits, pollen, egg cells, zygotes, seeds, cuttings, cell or tissue cultures, or any other part or product of a plant.

[0104] A “plant organ” is a distinct and visibly structured and differentiated part of a plant such as a root, stem, leaf, flower bud, or embryo.

[0105] As used herein, the term “plant part” includes but is not limited to embryos, pollen, ovules, seeds, leaves, flowers, branches, fruit, stalks, roots, root tips, anthers, and/or plant cells including plant cells that are intact in plants and/or parts of plants, plant protoplasts, plant tissues, plant cell tissue cultures, plant calli, plant clumps, and the like.

[0106] “Plant tissue” as used herein means a group of plant cells organized into a structural and functional unit. Any tissue of a plant in planta or in culture is included. This term includes, but is not limited to, whole plants, plant organs, plant seeds, tissue culture and any groups of plant cells organized into structural or functional units. The use of this term in conjunction with, or in the absence of, any specific type of plant tissue as listed above or otherwise embraced by this definition is not intended to be exclusive of any other type of plant tissue.

[0107] “Polyadenylation signal” or “polyA signal” refers to a nucleic acid sequence located 3′ to a coding region that causes the addition of adenylate nucleotides to the 3′ end of the mRNA transcribed from the coding region.

[0108] “Polymerase chain reaction (PCR)” refers to a DNA amplification method that uses an enzymatic technique to create multiple copies of one sequence of nucleic acid (amplicon). Copies of a DNA molecule are prepared by shuttling a DNA polymerase between two amplimers. The basis of this amplification method is multiple cycles of temperature changes to denature, then re-anneal amplimers (DNA primer molecules), followed by extension to synthesize new DNA strands in the region located between the flanking amplimers. Nucleic-acid amplification can be accomplished by any of the various nucleic-acid amplification methods known in the art, including the polymerase chain reaction (PCR). A variety of amplification methods are known in the art and are described, inter alia, in U.S. Pat. Nos. 4,683,195 and 4,683,202 and in PCR Protocols: A Guide to Methods and Applications, ed. Innis et al., Academic Press, San Diego, 1990. PCR amplification methods have been developed to amplify up to 22 kb of genomic DNA and up to 42 kb of bacteriophage DNA (Cheng et al., Proc. Natl. Acad. Sci. USA 91:5695-5699, 1994). These methods as well as other methods known in the art of DNA amplification may be used in the practice of the present invention.

[0109] As used herein, the term “primer” refers to an oligonucleotide which is capable of annealing to a nucleic acid target and serving as a point of initiation of DNA synthesis when placed under conditions in which synthesis of a primer extension product is induced (e.g., in the presence of nucleotides and an agent for polymerization such as DNA polymerase and at a suitable temperature and pH). A primer (in some embodiments an extension primer and in some embodiments an amplification primer) is in some embodiments single stranded for maximum efficiency in extension and/or amplification. In some embodiments, the primer is an oligodeoxyribonucleotide. A primer is typically sufficiently long to prime the synthesis of extension and/or amplification products in the presence of the agent for polymerization. The minimum length of the primer can depend on many factors, including, but not limited to temperature and composition (A/T vs. G/C content) of the primer. In the context of amplification primers, these are typically provided as a pair of bi-directional primers consisting of one forward and one reverse primer or provided as a pair of forward primers as commonly used in the art of DNA amplification such as in PCR amplification. As such, it will be understood that the term “primer,” as used herein, can refer to more than one primer, particularly in the case where there is some ambiguity in the information regarding the terminal sequence(s) of the target region to be amplified. Hence, a “primer” can include a collection of primer oligonucleotides containing sequences representing the possible variations in the sequence or includes nucleotides which allow a typical base pairing. Primers can be prepared by any suitable method known in the art. Methods for preparing oligonucleotides of specific sequence are known in the art, and include, for example, cloning and restriction of appropriate sequences and direct chemical synthesis. Chemical synthesis methods can include, for example, the phospho di- or tri-ester method, the diethylphosphoramidate method and the solid support method disclosed in U.S. Pat. No. 4,458,066. Primers can be labeled, if desired, by incorporating detectable moieties by for instance spectroscopic, fluorescence, photochemical, biochemical, immunochemical, or chemical moieties. Primers diagnostic (i.e. able to identify or select based on presence of ASR resistant alleles) for ASR resistance can be created to any favorable SNP as described in any one of Tables 1-5. The PCR method is well described in handbooks and known to the skilled person. After amplification by PCR, target polynucleotides can be detected by hybridization with a probe polynucleotide, which forms a stable hybrid with the target sequence under stringent to moderately stringent hybridization and wash conditions. If it is expected that the probes are essentially completely complementary (i.e., about 99% or greater) to the target sequence, stringent conditions can be used. If some mismatching is expected, for example if variant strains are expected with the result that the probe will not be completely complementary, the stringency of hybridization can be reduced. In some embodiments, conditions are chosen to rule out non-specific/adventitious binding. Conditions that affect hybridization, and that select against non-specific binding are known in the art, and are described in, for example, Sambrook & Russell (2001). Molecular Cloning: A Laboratory Manual, Third Edition, Cold Spring Harbor Laboratory Press, Cold Spring Harbor, N.Y., United States of America. Generally, lower salt concentration and higher temperature hybridization and/or washes increase the stringency of hybridization conditions.

[0110] As used herein, the terms “progeny” and “progeny plant” refer to a plant generated from a vegetative or sexual reproduction from one or more parent plants. A progeny plant may be obtained by cloning or selfing a single parent plant, or by crossing two parental plants.

[0111] The term “promoter” or “promoter region” refers to a polynucleic acid molecule that functions as a regulatory element, usually found upstream (5′) to a coding sequence, that controls expression of the coding sequence by controlling production of messenger RNA (mRNA) by providing the recognition site for RNA polymerase and/or other factors necessary for start of transcription at the correct site. As contemplated herein, a promoter or promoter region includes variations of promoters derived by means of ligation to various regulatory sequences, random or controlled mutagenesis, and addition or duplication of enhancer sequences. The promoter region disclosed herein, and biologically functional equivalents thereof, are responsible for driving the transcription of coding sequences under their control when introduced into a host as part of a suitable recombinant DNA construct, as demonstrated by its ability to produce mRNA.

[0112] A “recombinant” nucleic acid is made by a combination of two otherwise separated segments of nucleic acid sequence, for example, by chemical synthesis or by the manipulation of isolated segments of polynucleic acids by genetic engineering techniques. The term “recombinant DNA construct” refers to any agent such as a plasmid, cosmid, virus, autonomously replicating sequence, phage, or linear or circular single-stranded or double-stranded DNA or RNA nucleotide sequence, derived from any source, capable of genomic integration or autonomous replication, comprising a DNA molecule that one or more DNA sequences have been linked in a functionally operative manner. Such recombinant DNA constructs are capable of introducing a 5′ regulatory sequence or promoter region and a DNA sequence for a selected gene product into a cell in such a manner that the DNA sequence is transcribed into a functional mRNA that is translated and therefore expressed. Recombinant DNA constructs may be constructed to be capable of expressing antisense RNAs, or stabilized double stranded antisense RNAs.

[0113] The phrase “substantially identical,” in the context of two nucleic acids or two amino acid sequences, refers to two or more sequences or subsequences that have at least about 50% nucleotide or amino acid residue identity when compared and aligned for maximum correspondence as measured using a sequence comparison algorithm or by visual inspection. In certain embodiments, substantially identical sequences have at least about 60%, 65%, 70%, 75%, 80%, 81%, 82%, 83%, 84%, 85%, 86%, 87%, 88%, 89%, 90%, 91%, 92%, 93%, 94%, 95%, 96%, 97%, 98%, 99% or more nucleotide or amino acid residue identity. In certain embodiments, substantial identity exists over a region of the sequences that is at least about 50 amino acid residues, 100 amino acid residues, 150 amino acid residues, 200 amino acid residues, 250 amino acid residues, 300 amino acid residues, 350 amino acid residues, 400 amino acid residues, 450 amino acid residues, 500 amino acid residues, 525 amino acid residues, 526, amino acid residues 527 amino acid residues, 528 amino acid residues, 529 amino acid residues, 530 amino acid residues, 531 amino acid residues, 532 amino acid residues, 533 amino acid residues, 534 amino acid residues, 535 amino acid residues, 536 amino acid residues or more with respect to the protein sequence or the nucleotide sequence encoding the same. In further embodiments, the sequences are substantially identical when they are identical over the entire length of the coding regions.

[0114] “Identity” or “percent identity” refers to the degree of identity between two nucleic acid or amino acid sequences. For sequence comparison, typically one sequence acts as a reference sequence to which test sequences are compared. When using a sequence comparison algorithm, test and reference sequences are input into a computer, subsequence coordinates are designated if necessary, and sequence algorithm program parameters are designated. The sequence comparison algorithm then calculates the percent sequence identity for the test sequence(s) relative to the reference sequence, based on the designated program parameters.

[0115] For sequence comparison, typically one sequence acts as a reference sequence to which test sequences are compared. When using a sequence comparison algorithm, test and reference sequences are input into a computer, subsequence coordinates are designated if necessary, and sequence algorithm program parameters are designated. The sequence comparison algorithm then calculates the percent sequence identity for the test sequence(s) relative to the reference sequence, based on the designated program parameters.

[0116] Optimal alignment of sequences for comparison can be conducted, e.g., by the local homology algorithm of Smith & Waterman, Adv. Appl. Math. 2: 482 (1981), by the homology alignment algorithm of Needleman & Wunsch, J. Mol. Biol. 48: 443 (1970), by the search for similarity method of Pearson & Lipman, Proc. Nat'l. Acad. Sci. USA 85: 2444 (1988), by computerized implementations of these algorithms (GAP, BESTFIT, FASTA, and TFASTA in the Wisconsin Genetics Software Package, Genetics Computer Group, 575 Science Dr., Madison, Wis.), or by visual inspection (see generally).

[0117] One example of an algorithm that is suitable for determining percent sequence identity and sequence similarity is the BLAST algorithm, which is described in Altschul et al., J. Mol. Biol. 215: 403-410 (1990). Software for performing BLAST analyses is publicly available through the National Center for Biotechnology Information (on the world wide web at ncbi.nlm.nih.gov/). This algorithm involves first identifying high scoring sequence pairs (HSPs) by identifying short words of length W in the query sequence, which either match or satisfy some positive-valued threshold score T when aligned with a word of the same length in a database sequence. T is referred to as the neighborhood word score threshold (Altschul et al., J. Mol. Biol. 215: 403-410 (1990)). These initial neighborhood word hits act as seeds for initiating searches to find longer HSPs containing them. The word hits are then extended in both directions along each sequence for as far as the cumulative alignment score can be increased. Cumulative scores are calculated using, for nucleotide sequences, the parameters M (reward score for a pair of matching residues; always >0) and N (penalty score for mismatching residues; always <0). For amino acid sequences, a scoring matrix is used to calculate the cumulative score. Extension of the word hits in each direction are halted when the cumulative alignment score falls off by the quantity X from its maximum achieved value, the cumulative score goes to zero or below due to the accumulation of one or more negative-scoring residue alignments, or the end of either sequence is reached. The BLAST algorithm parameters W, T, and X determine the sensitivity and speed of the alignment. The BLASTN program (for nucleotide sequences) uses as defaults a wordlength (W) of 11, an expectation (E) of 10, a cutoff of 100, M=5, N=−4, and a comparison of both strands. For amino acid sequences, the BLASTP program uses as defaults a wordlength (W) of 3, an expectation (E) of 10, and the BLOSUM62 scoring matrix (see, Henikoff & Henikoff, Proc. Natl. Acad. Sci. USA 89: 10915 (1989)).

[0118] In addition to calculating percent sequence identity, the BLAST algorithm also performs a statistical analysis of the similarity between two sequences (see, e.g., Karlin & Altschul, Proc. Nat'l. Acad. Sci. USA 90: 5873-5787 (1993)). One measure of similarity provided by the BLAST algorithm is the smallest sum probability (P(N)), which provides an indication of the probability by which a match between two nucleotide or amino acid sequences would occur by chance. For example, a test nucleic acid sequence is considered similar to a reference sequence if the smallest sum probability in a comparison of the test nucleic acid sequence to the reference nucleic acid sequence is less than about 0.1, more preferably less than about 0.01, and most preferably less than about 0.001.

[0119] Another widely used and accepted computer program for performing sequence alignments is CLUSTALW v1.6 (Thompson, et al. Nuc. Acids Res., 22: 4673-4680, 1994). The number of matching bases or amino acids is divided by the total number of bases or amino acids, and multiplied by 100 to obtain a percent identity. For example, if two 580 base pair sequences had 145 matched bases, they would be 25 percent identical. If the two compared sequences are of different lengths, the number of matches is divided by the shorter of the two lengths. For example, if there were 100 matched amino acids between a 200 and a 400 amino acid proteins, they are 50 percent identical with respect to the shorter sequence. If the shorter sequence is less than 150 bases or 50 amino acids in length, the number of matches are divided by 150 (for nucleic acid bases) or 50 (for amino acids), and multiplied by 100 to obtain a percent identity.

[0120] Two nucleotide sequences can also be considered to be substantially identical when the two sequences hybridize to each other under stringent conditions. In representative embodiments, two nucleotide sequences considered to be substantially identical hybridize to each other under highly stringent conditions.

[0121] The terms “stringent conditions” or “stringent hybridization conditions” include reference to conditions under which a nucleic acid will selectively hybridize to a target sequence to a detectably greater degree than other sequences (e.g., at least 2-fold over a non-target sequence), and optionally may substantially exclude binding to non-target sequences. Stringent conditions are sequence-dependent and will vary under different circumstances. By controlling the stringency of the hybridization and/or washing conditions, target sequences can be identified that can be up to 100% complementary to the reference nucleotide sequence. Alternatively, conditions of moderate or even low stringency can be used to allow some mismatching in sequences so that lower degrees of sequence similarity are detected. For example, those skilled in the art will appreciate that to function as a primer or probe, a nucleic acid sequence only needs to be sufficiently complementary to the target sequence to substantially bind thereto so as to form a stable double-stranded structure under the conditions employed. Thus, primers or probes can be used under conditions of high, moderate or even low stringency. Likewise, conditions of low or moderate stringency can be advantageous to detect homolog, ortholog and/or paralog sequences having lower degrees of sequence identity than would be identified under highly stringent conditions.

[0122] The terms “complementary” or “complementarity” (and similar terms), as used herein, refer to the natural binding of polynucleotides under permissive salt and temperature conditions by base-pairing. For example, the sequence “A-G-T” binds to the complementary sequence “T-C-A.” Complementarity between two single-stranded molecules may be partial, in which only some of the nucleotides bind, or it may be complete when total complementarity exists between the single stranded molecules. The degree of complementarity between nucleic acid strands has significant effects on the efficiency and strength of hybridization between the molecules. As used herein, the term “substantially complementary” (and similar terms) means that two nucleic acid sequences are at least about 50%, 60%, 70%, 75%, 80%, 85%, 90%, 95%, 96%, 97%, 98%, 99% or more complementary. Alternatively, the term “substantially complementary” (and similar terms) can mean that two nucleic acid sequences can hybridize together under high stringency conditions (as described herein).

[0123] As used herein, “specifically” or “selectively” hybridizing (and similar terms) refers to the binding, duplexing, or hybridizing of a molecule to a particular nucleic acid target sequence under stringent conditions when that sequence is present in a complex mixture (e.g., total cellular DNA or RNA) to the substantial exclusion of non-target nucleic acids, or even with no detectable binding, duplexing or hybridizing to non-target sequences. Specifically or selectively hybridizing sequences typically are at least about 40% complementary and are optionally substantially complementary or even completely complementary (i.e., 100% identical).

[0124] For DNA-DNA hybrids, the Tₘ can be approximated from the equation of Meinkoth and Wahl, Anal. Biochem., 138:267-84 (1984): Tₘ=81.5° C.+16.6 (log M)+0.41 (% GC)−0.61 (% formamide)−500/L; where M is the molarity of monovalent cations, % GC is the percentage of guanosine and cytosine nucleotides in the DNA, % formamide is the percentage of formamide in the hybridization solution, and L is the length of the hybrid in base pairs. The Tₘ is the temperature (under defined ionic strength and pH) at which 50% of a complementary target sequence hybridizes to a perfectly matched probe. Tₘ is reduced by about 1° C. for each 1% of mismatching; thus, Tₘ, hybridization and/or wash conditions can be adjusted to hybridize to sequences of the desired degree of identity. For example, if sequences with >90% identity are sought, the Tₘ can be decreased 10° C. Generally, stringent conditions are selected to be about 5° C. lower than the thermal melting point (Tₘ) for the specific sequence and its complement at a defined ionic strength and pH. However, highly stringent conditions can utilize a hybridization and/or wash at the thermal melting point (Tₘ) or 1, 2, 3 or 4° C. lower than the thermal melting point (Tₘ); moderately stringent conditions can utilize a hybridization and/or wash at 6, 7, 8, 9 or 10° C. lower than the thermal melting point (Tₘ); low stringency conditions can utilize a hybridization and/or wash at 11, 12, 13, 14, 15 or 20° C. lower than the thermal melting point (Tₘ). If the desired degree of mismatching results in a Tₘ of less than 45° C. (aqueous solution) or 32° C. (formamide solution), optionally the SSC concentration can be increased so that a higher temperature can be used. An extensive guide to the hybridization of nucleic acids is found in Tijssen, Laboratory Techniques in Biochemistry and Molecular Biology-Hybridization with Nucleic Acid Probes, part I, chapter 2, “Overview of principles of hybridization and the strategy of nucleic acid probe assays,” Elsevier, New York (1993); Current Protocols in Molecular Biology, chapter 2, Ausubel, et al., eds, Greene Publishing and Wiley-Interscience, New York (1995); and Green & Sambrook, In: Molecular Cloning, A Laboratory Manual, 4th Edition, Cold Spring Harbor Press, Cold Spring Harbor, N.Y. (2012).

[0125] Typically, stringent conditions are those in which the salt concentration is less than about 1.5 M Na ion, typically about 0.01 to 1.0 M Na ion concentration (or other salts) at about pH 7.0 to pH 8.3 and the temperature is at least about 30° C. for short probes (e.g., 10 to 50 nucleotides) and at least about 60° C. for longer probes (e.g., greater than 50 nucleotides). Stringent conditions may also be achieved with the addition of destabilizing agents such as formamide or Denhardt's (5 g Ficoll, 5 g polyvinylpyrrolidone, 5 g bovine serum albumin in 500 ml of water). Exemplary low stringency conditions include hybridization with a buffer solution of 30% to 35% formamide, 1 M NaCl, 1% SDS (sodium dodecyl sulfate) at 37° C. and a wash in 1× to 2×SSC (20×SSC=3.0 M NaCl/0.3 M trisodium citrate) at 50° C. to 55° C. Exemplary moderate stringency conditions include hybridization in 40% to 45% formamide, 1 M NaCl, 1% SDS at 37° C. and a wash in 0.5× to 1×SSC at 55° C. to 60° C. Exemplary high stringency conditions include hybridization in 50% formamide, 1 M NaCl, 1% SDS at 37° C. and a wash in 0.1×SSC at 60° C. to 65° C. A further non-limiting example of high stringency conditions include hybridization in 4×SSC, 5×Denhardt's, 0.1 mg/ml boiled salmon sperm DNA, and 25 mM Na phosphate at 65° C. and a wash in 0.1×SSC, 0.1% SDS at 65° C. Another illustration of high stringency hybridization conditions includes hybridization in 7% SDS, 0.5 M NaPO₄, 1 mM EDTA at 50° C. with washing in 2×SSC, 0.1% SDS at 50° C., alternatively with washing in 1×SSC, 0.1% SDS at 50° C., alternatively with washing in 0.5×SSC, 0.1% SDS at 50° C., or alternatively with washing in 0.1×SSC, 0.1% SDS at 50° C., or even with washing in 0.1×SSC, 0.1% SDS at 65° C. Those skilled in the art will appreciate that specificity is typically a function of post-hybridization washes, the relevant factors being the ionic strength and temperature of the final wash solution.

[0126] Nucleic acids that do not hybridize to each other under stringent conditions are still substantially identical if the proteins that they encode are substantially identical (e.g., due to the degeneracy of the genetic code).

[0127] A further indication that two nucleic acids or proteins are substantially identical is that the protein encoded by the first nucleic acid is immunologically cross reactive with the protein encoded by the second nucleic acid. Thus, a protein is typically substantially identical to a second protein, for example, where the two proteins differ only by conservative substitutions.

[0128] The term “vector” refers to a composition for transferring, delivering or introducing a nucleic acid (or nucleic acids) into a cell. A vector comprises a nucleic acid molecule comprising the nucleotide sequence(s) to be transferred, delivered or introduced.

### Expression of an R-Gene Coding Sequence in Plants

[0129] DNA constructs are made that contain various genetic elements necessary for the expression of the R-Gene coding sequence in plants. “DNA construct” refers to the heterologous genetic elements operably linked to each other making up a recombinant DNA molecule and may comprise elements that provide expression of a DNA polynucleotide molecule in a host cell and elements that provide maintenance of the construct in the host cell. A plant expression cassette comprises the operable linkage of genetic elements that when transferred into a plant cell provides expression of a desirable gene product. “Plant expression cassette” refers to chimeric DNA segments comprising the regulatory elements that are operably linked to provide the expression of a transgene product in plants. Promoters, leaders, introns, transit peptide encoding polynucleic acids, 3′ transcriptional termination regions are all genetic elements that may be operably linked by those skilled in the art of plant molecular biology to provide a desirable level of expression or functionality to an R-gene of the present invention. A DNA construct can contain one or more plant expression cassettes expressing the DNA molecules of the present invention or other DNA molecules useful in the genetic engineering of crop plants.

[0130] A variety of promoters specifically active in vegetative tissues, such as leaves, stems, roots and tubers, can be used to express the R-gene polynucleic acid molecules of the present invention.

[0131] The translation leader sequence means a DNA molecule located between the promoter of a gene and the coding sequence. The translation leader sequence is present in the fully processed mRNA upstream of the translation start sequence. The translation leader sequence may affect processing of the primary transcript to mRNA, mRNA stability or translation efficiency. Examples of translation leader sequences include maize and petunia heat shock protein leaders, plant virus coat protein leaders, plant rubisco gene leaders among others (Turner and Foster, Molecular Biotechnology 3:225, 1995).

[0132] The “3′ non-translated sequences” means DNA sequences located downstream of a structural polynucleotide sequence and include sequences encoding polyadenylation and other regulatory signals capable of affecting mRNA processing or gene expression. The polyadenylation signal functions in plants to cause the addition of polyadenylate nucleotides to the 3′ end of the mRNA precursor. The polyadenylation sequence can be derived from the natural gene, from a variety of plant genes, or from T-DNA. An example of the polyadenylation sequence is the nopaline synthase 3′ sequence (nos 3′; Fraley et al., Proc. Natl. Acad. Sci. USA 80: 4803-4807, 1983). The use of different 3′ non-translated sequences is exemplified by Ingelbrecht et al., Plant Cell 1:671-680, 1989.

[0133] The laboratory procedures in recombinant DNA technology used herein are those well-known and commonly employed in the art. Standard techniques are used for cloning, DNA and RNA isolation, amplification and purification. Generally enzymatic reactions involving DNA ligase, DNA polymerase, restriction endonucleases and the like are performed according to the manufacturer's specifications. These techniques and various other techniques are generally performed according to Sambrook et al. (1989).

[0134] The DNA construct of the present invention may be introduced into the genome of a desired plant host by a variety of conventional transformation techniques that are well known to those skilled in the art. “Transformation” refers to a process of introducing an exogenous polynucleic acid molecule (for example, a DNA construct, a recombinant polynucleic acid molecule) into a cell or protoplast and that exogenous polynucleic acid molecule is incorporated into a host cell genome or an organelle genome (for example, chloroplast or mitochondria) or is capable of autonomous replication. “Transformed” or “transgenic” refers to a cell, tissue, organ, or organism into which a foreign polynucleic acid, such as a DNA vector or recombinant polynucleic acid molecule. A “transgenic” or “transformed” cell or organism also includes progeny of the cell or organism and progeny produced from a breeding program employing such a “transgenic” plant as a parent in a cross and exhibiting an altered phenotype resulting from the presence of the foreign polynucleic acid molecule.

[0135] Methods of transformation of plant cells or tissues include, but are not limited to Agrobacterium mediated transformation method and the Biolistics or particle-gun mediated transformation method. Suitable plant transformation vectors for the purpose of Agrobacterium mediated transformation include-those elements derived from a tumor inducing (Ti) plasmid of Agrobacterium tumefaciens, for example, right border (RB) regions and left border (LB) regions, and others disclosed by Herrera-Estrella et al., Nature 303:209 (1983); Bevan, Nucleic Acids Res. 12:8711-8721 (1984); Klee et al., Bio-Technology 3(7):637-642 (1985). In addition to plant transformation vectors derived from the Ti or root-inducing (Ri) plasmids of Agrobacterium, alternative methods can be used to insert the DNA constructs of this invention into plant cells. Such methods may involve, but are not limited to, for example, the use of liposomes, electroporation, chemicals that increase free DNA uptake, free DNA delivery via microprojectile bombardment, and transformation using viruses or pollen.

[0136] DNA constructs can be prepared that incorporate the R-gene coding sequences of the present invention for use in directing the expression of the sequences directly from the host plant cell plastid. Examples of such constructs suitable for this purpose and methods that are known in the art and are generally described, for example, in Svab et al., Proc. Natl. Acad. Sci. USA 87:8526-8530, (1990) and Svab et al., Proc. Natl. Acad. Sci. USA 90:913-917 (1993) and in U.S. Pat. No. 5,693,507.

[0137] When adequate numbers of cells containing the exogenous polynucleic acid molecule encoding polypeptides from the present invention are obtained, the cells can be cultured, then regenerated into whole plants. “Regeneration” refers to the process of growing a plant from a plant cell (for example, plant protoplast or explant). Such regeneration techniques rely on manipulation of certain phytohormones in a tissue culture growth medium, typically relying on a biocide and/or herbicide marker that has been introduced together with the desired nucleotide sequences. Choice of methodology for the regeneration step is not critical See, for example, Ammirato et al., Handbook of Plant Cell Culture—Crop Species. Macmillan Publ. Co. (1984); Shimamoto et al., Nature 338:274-276 (1989); Fromm, UCLA Symposium on Molecular Strategies for Crop Improvement, Apr. 16-22, 1990. Keystone, Colo. (1990); Vasil et al., Bio/Technology 8:429-434 (1990); Vasil et al., Bio/Technology 10:667-674 (1992); Hayashimoto, Plant Physiol. 93:857-863 (1990); and Datta et al., Bio-technology 8:736-740 (1990). Such regeneration techniques are described generally in Klee et al., Ann. Rev. Plant Phys. 38:467-486 (1987).

[0138] The development or regeneration of transgenic plants containing the exogenous polynucleic acid molecule that encodes a polypeptide of interest is well known in the art. Preferably, the regenerated plants are self-pollinated to provide homozygous transgenic plants, as discussed above. Otherwise, pollen obtained from the regenerated plants is crossed to seed-grown plants of agronomically important lines. Conversely, pollen from plants of these important lines is used to pollinate regenerated plants.

### Disease Resistant Soybean Plants and Germplasms

[0139] The present invention provides disease resistant soybean plants and germplasms. A Disease resistant soybean plant or germplasm may be produced by any method whereby an R-gene is introduced into the soybean plant or germplasm, including, but not limited to, transformation, protoplast transformation or fusion, a double haploid technique, embryo rescue, gene editing and/or by any other nucleic acid transfer system.

[0140] In some embodiments, the soybean plant or germplasm comprises a non-naturally occurring variety of soybean. In some embodiments, the soybean plant or germplasm is at least about 50%, 55%, 60%, 65%, 70%, 75%, 80%, 85%, 90%, 95%, 97%, 99% or 100% identical to that of an elite variety of soybean.

[0141] The disease resistant soybean plant or germplasm may be the progeny of a cross between an elite variety of soybean and a variety of soybean that comprises an R-gene for enhanced Disease tolerance (e.g. ASR) wherein the R-gene is selected from the group consisting of genes encoding a protein having a CNL or TNLW R-gene motif or a gene having between 70-100% homology to any of SEQ ID NOs: 6, 9, 12, 15, 18, 21, 24, 27, or 30.

[0142] The disease resistant soybean plant or germplasm may be the progeny of an introgression wherein the recurrent parent is an elite variety of soybean and the donor comprises an R-gene associated with enhanced disease tolerance and/or resistance wherein the donor carries a gene encoding a protein having a CNL or TNLW R-gene motif or a gene having between 70-100% homology to any of SEQ ID NOs: 6, 9, 12, 15, 18, 21, 24, 27, or 30.

[0143] The disease resistant soybean plant or germplasm may be the progeny of a cross between a first elite variety of soybean (e.g., a tester line) and the progeny of a cross between a second elite variety of soybean (e.g., a recurrent parent) and a variety of soybean that comprises an R-gene.

[0144] A disease resistant soybean plant and germplasm of the present invention may comprise one or R-genes of the present invention (e.g. any any of SEQ ID NOs: 6, 9, 12, 15, 18, 21, 24, 27, or 30).

### Disease Resistant Soybean Seeds

[0145] The present invention provides disease resistant soybean seeds. As discussed above, the methods of the present invention may be utilized to identify, produce and/or select a disease resistant soybean seed. In addition to the methods described above, a disease resistant soybean seed may be produced by any method whereby an R-gene is introduced into the soybean seed, including, but not limited to, transformation, protoplast transformation or fusion, a double haploid technique, embryo rescue, genetic editing (e.g. CRISPR or TALEN or MegaNucleases) and/or by any other nucleic acid transfer system.

[0146] In some embodiments, the disease resistant soybean seed comprises a non-naturally occurring variety of soybean. In some embodiments, the soybean seed is at least about 50%, 55%, 60%, 65%, 70%, 75%, 80%, 85%, 90%, 95%, 97%, 99% or 100% identical to that of an elite variety of soybean.

[0147] The disease resistant soybean seed may be produced by a disease resistant soybean plant identified, produced or selected by the methods of the present invention.

[0148] A disease resistant soybean seed of the present invention may comprise, be selected by or produced by use of one or more R-genes of the present invention.

[0149] The embodiments of the invention include the following:

### EXAMPLES

[0150] The following examples are not intended to be a detailed catalog of all the different ways in which the present invention may be implemented or of all the features that may be added to the present invention. Persons skilled in the art will appreciate that numerous variations and additions to the various embodiments may be made without departing from the present invention. Hence, the following descriptions are intended to illustrate some particular embodiments of the invention, and not to exhaustively specify all permutations, combinations and variations thereof.

### Example 1 Identification of ASR Resistant Wild Glycine Lines

[0151] Multiple wild glycine (Glycine tomentella) lines were evaluated for ASR resistance against sixteen rust strains collected across a diverse range of environments. The rust data were generated using single pustule derived isolates from USDA-ARS (FL Q09, FL Q12, LABR13, FLQ11) and field populations (FL Q15, FLQ16, RTP1, RTP2, Vero, BR01, BR02 and BR03), the screening was carried out in contained facilities. Of the Glycine tomentella lines screened for ASR resistance, the following Glycine tomentella lines showed broad resistance against all ASR strains tested: PI441001, PI483224, PI583970, PI446958, PI499939, PI505220, PI499933, PI441008, PI505256 or PI446961.

[0152] Each Glycine tomentella line was evaluated over a multiple day course of infection and rated at various time points using a rust rating scale based on groupings modified from Burdon and Speer, T A G, 1984 (see FIG. 6). Each Glycine tomentella accession was screened >2 times with ^{˜}4 plants each time in using a large diverse panel of rust isolates.

### Example 2 Allele Mining & Associations to PI441001, PI441008, PI446958, PI583970, or PI483224 ASR Loci

[0153] Resistant parent lines (i.e. PI441001, PI441008, PI446958, PI583970, and PI483224) were crossed with a susceptible Glycine tomentella line and F1 plants were generated (See Table 2). F1 plants were self-fertilized to generate F2 seed. F2 seed was harvested from the selfed F1 plant. Around 200 F2 seed were sown and leaf tissue from each plant was collected for genotyping studies. Each line was inoculated with Phakopsora pachyrhizi to determine the resistance/susceptible phenotype of each F2 individual. Tissue from 50 resistant F2s and 50 susceptible F2s were combined in separate pools and genomic DNA was prepared from each pool. Illumina sequencing libraries were prepared from DNA for each of the pools and each library was sequenced in two Illumina HiSeq2000 2×100 bp Paired-End (PE) lanes. The average yield per sample was 383 million read pairs, which equals 77 gigabases of sequence per library. The sequencing reads were trimmed to remove bases with PHRED quality scores of <15.

[0154] Quality trimmed reads were aligned to the PI441001, PI441008, PI583970, and PI483224 reference genome sequence using GSNAP (WU and NACU 2010) as paired-end fragments. If a pair of reads could not be aligned together, they were treated as singletons for alignment. Reads were used in subsequent analyses if they mapped uniquely to the reference (2 mismatches every 36 bp and less than 5 bases for every 75 bp as tails).

[0155] SNPs were filtered prior to BSA analysis based on read depth, with SNPs having between 40 and 200× read depth being retained. A Chi-square test was used to select SNPs with significantly different read counts between the two alleles in the two pools. An empirical Bayesian approach (LIU et al. 2012) was used to estimate the conditional probability that there is no recombination between each SNP marker and the causal locus in both the resistant pool and in the susceptible pool. The probability of the linkage between the SNP and the causal gene is the geometric mean of these two conditional probabilities. Around 1000 SNPs were found to have possible linkage to the target locus. A subset of these putatively linked SNPs were used to fine map the locus using phenotyped F2 individuals. See references: LIU, S., C.-T. YEH, H. M. TANG, D. NETTLETON AND P. S. SCHNABLE, 2012 Gene Mapping via Bulked Segregant RNA-Seq (BSR-Seq). PLoS ONE 7: e36406 & Wu, T. D., and S. Nacu, 2010 Fast and SNP-tolerant detection of complex variants and splicing in short reads. Bioinformatics 26: 873-881.

TABLE 2
Plant Crossings and Study Type

| | | | | F2: Resistant |
|---|---|---|---|---|
| | PI# | PI # | Genome | to Susceptible |
| Species | (male) | (female) | Size (Gb) | Ratio |
| G. tomentella | PI441001 | PI441010 | 2 | 3:1 |
| G. tomentella | PI441001 | PI441011 | 2 | 3:1 |
| G. tomentella | PI441001 | PI441010 | 2 | 3:1 |
| G. tomentella | PI583970 | PI441007 | 2 | 3:1 |
| G. tomentella | PI583970 | PI441010 | 2 | 3:1 |
| G. tomentella | PI583970 | PI441011 | 2 | 3:1 |
| G. tomentella | PI448224 | PI441010 | 2 | 3:1 |
| G. tomentella | PI441008 | PI441010 | 2 | 7:9 |

[0156] 1. PI441001 Data2Bio LLC (Ames, Iowa) Lab Methodology for gBSA-Seq Analysis for Tetraploid Soybean.

[0157] Chromosome discovery for causal loci in the tetraploid soybean population, PI441001 was carried out using Data2Bio's Genomic Bulked Segregant Analysis (gBSA) technology. It was theorized that ASR resistance is controlled by a single dominant allele. Four libraries were generated from DNA samples extracted from two susceptible tissue pools and two resistant tissue pools. These pools were then sequenced in eight (8) IIlumina HiSeq2000 2×100 bp Paired-End (PE) lanes. A summary of the reference genomes used for subsequent analyses, read processing from raw data to quality trimming, alignment, SNP discovery and SNP impact are demonstrated in FIGS. 1-5 for population 441001. After various filtering steps 110,503 informative SNPs were identified in the PI441001 genome as being significantly associated with ASR resistance. A Bayesian approach was then used to calculate trait-associated probabilities. Next, physical maps of trait-associated SNPs (probability cutoff at 0.01) for the top contigs were created (FIG. 1). Two scaffolds, 46840 and 49652, were identified in PI441001 (SEQ ID NOs: 1 and 2 respectively). SNPs from these enriched scaffolds were mapped to the public Glycine max genome. In both populations, most of the SNPs from the top scaffolds clustered on small portions of Chr05 and Chr08 (see FIG. 4).

[0158] 2. PI583970 Data2Bio LLC (Ames, Iowa) Lab Methodology for gBSA-Seq Analysis for Tetraploid Soybean

[0159] Chromosome discovery for loci in the tetraploid soybean population, PI583970 was carried out using Data2Bio's Genomic Bulked Segregant Analysis (gBSA) technology. Two libraries were created from RNA samples extracted from one susceptible tissue pool and one resistant tissue RNA pool. After various filtering steps 59,014 informative SNPs were identified in the PI583970 genome that were significantly associated with ASR resistance. A Bayesian approach was then used to calculate trait-associated probabilities. Next, a physical map of trait-associated SNPs on contigs was created. The clustering of these SNPs suggests that the resistance loci is located in or near scaffold 000819F (see FIG. 7; Scaffold 001084F is SEQ ID NO: 4). The context sequences associated with these SNPs were also aligned to the public Glycine max genome to create a chromosome-level understanding of the mapping interval. The chromosomal positions of the trait-associated (ASR resistance) SNPs were then displayed graphically. Most of the SNPs from scaffold 001084F mapped and clustered on a small region of Chr05 (see FIG. 8). The data suggest that the loci responsible for ASR resistance maps within or near the interval 0.11 to 0.30 Mbp on scaffold 001084F (FIG. 9).

[0160] 3. PI483224 Data2Bio LLC (Ames, Iowa) Lab Methodology for gBSA-Seq Analysis for Tetraploid Soybean

[0161] Chromosome discovery for causal loci in the tetraploid soybean population, PI483224 was carried out using Data2Bio's Genomic Bulked Segregant Analysis (gBSA) technology. Two libraries were created from DNA samples extracted from one susceptible tissue pool and one resistant tissue pool (PI483224). After various filtering steps 428,263 informative SNPs were identified in the PI483224 genome to be significantly associated with ASR resistance. A Bayesian approach was then used to calculate trait-associated probabilities. Next, a physical map of trait-associated SNPs on contigs was created. The clustering of these SNPs indicates that the ASR resistance loci is located on or near scaffold 002687F (see FIG. 10). The context sequences associated with these SNPs were also aligned to the public Glycine max genome to create a chromosome-level understanding of the mapping interval. The chromosomal positions of the trait-associated (ASR resistant) SNPs were displayed graphically. Most of the SNPs from scaffold 002687F mapped to a small region of Chr05 (See FIG. 11). Data indicates that the ASR loci may map within or near the interval 0.17 to 0.36 MB on scaffold 002687F (see FIG. 12 and SEQ ID NO: 3).

### Example 3 Embryo Rescue & Introgression of R Gene Intervals into Glycine max Lines

[0162] Embryo rescue is performed (as described below) and chemical treatment to induce chromosome doubling is applied in order to generate amphidiploid shoots. If the amphidiploid plants are fertile they will be used to backcross with Glycine max. Backcrossing with Glycine max and subsequent embryo rescue will need to be performed for several generations in order to gradually eliminate the perennial Glycine tomentella chromosomes eventually resulting in ASR resistant Glycine max plant

[0163] Wide crosses were carried out using Elite Syngenta soybean (Glycine max) lines (RM 3.7 to 4.8). The elite soybean lines are used as the females (pollen recipients) and multiple accessions of Glycine tomentella are used as the males or pollen donors. Selecting flowers from the Glycine tomentella plant containing anthers at the proper developmental stage is important. New, fully-opened, brightly colored flowers hold anthers with mature pollen. The pollen should appear as loose, yellow dust. These flowers are removed from the Glycine tomentella plant and crossed with the elite Glycine max plant for pollination. Pollen from the Glycine tomentella plants should be used within 30 minutes of flower removal. It is also important to identify and select elite soybean flower buds that are ready for pollination. A soybean flower bud is generally ready when it is larger in size when compared to an immature bud. The sepals of the soybean blossoms are lighter in color and the petals are just beginning to appear. First, use a pair of fine-tipped tweezers to carefully detach the sepals from the flower bud to expose the outer set of petals. Then, gently grasp and remove the petals (5 in total) from the flower exposing the ring of stamens surrounding the pistil. Since the stigma is receptive to pollen 1 day before the anthers begin shedding pollen it is important to recognize the stage development of “female ready, male not ready”. When pollinating soybean flowers at this developmental stage it is not necessary to emasculate the female flower. Locate the stigma on the elite soybean flower. Then using 1 male flower, carefully peel off the petals to expose the anthers and gently dust the pollen grains onto the stigma of the soybean flower. Care should be taken not to damage the stigma at any time during this process. Starting the day after pollination a hormone mixture is sprayed onto the pollinated flower and eventual developing F1 pod 1× every day until harvest. The pollinated flower or pod is saturated with a light mist of the hormone mixture, taking care not to cause the flower/pod to prematurely detach from the plant. The mixture contains 100 mg GA3, 25 mg 1-Naphthaleneacetic acid (NAA) and 5 mg kinetin/L distilled water. Application of these hormones aid in the retention of the developing pod and in increased pod growth. The above described wide cross methodology results in success rates significantly higher than that reported in the literature. Further, no emasculation of female flowers is necessary, which saves time and reduces risk of damage to the stigma.

[0164] Harvest: Pods from wide crosses are harvested at approximately 14 to 16 days post pollination. (Harvest dates in the literature suggest 19 to 21 days, however the above method allows for faster harvest time and more robust pods). Pods are collected and counted according to wide cross combination to determine crossing success. The average crossing success across multiple soybean females and 5 different accessions of Glycine tomentella is approximately 40%. The wide cross pods can contain 1 to 3 seeds but generally 2 seeds are found in each F1 pod. The above described methodology allows for pod harvest at 14 to 16 days after pollination, ^{˜}5 days earlier than described in literature.

[0165] Embryo rescue: Harvested pods are collected and brought back to the lab to be sterilized. The pods are first rinsed with 70% EtOH for 2 to 3 minutes and then placed in 10% Clorox bleach for an additional 30 minutes on a platform shaker at approximately 130 RPM. Finally, the pods are rinsed multiple times with sterile water to remove any residual bleach. Embryo isolation can begin immediately following pod sterilization or pods can be stored at 4° C. for up to 24 hours prior to embryo isolation. The sterilized pods are next taken to a laminar flow hood where the embryos can be rescued. Individual pods are placed in a sterile petri dish and opened using a scalpel and forceps. An incision is made along the length of the wide cross pod away from the seed. The pod can then be easily opened to expose the seed. Alternatively, two pair of forceps can be used to separate the pod shell. Carefully remove the seed from the pod and place in a sterile petri dish under a dissection microscope. Very fine forceps are needed to isolate the embryo from the seed. With forceps in one hand, gently hold the side of the seed away from the embryo, with the hilum facing up. Use another pair of forceps in the other hand to remove the seed coat from the side of the seed containing the embryo. Peel off the membrane surrounding the embryo and push the embryo up from its bottom side. Embryos should be past the globular developmental stage and preferably past the early heart developmental stage (middle to late heart stage, cotyledon stage and early maturation stage embryos are desired). Isolated embryos are transferred to embryo rescue medium such as Soy ER1-1 (i.e. 3.1g B5 basal salt, Gamborg's, 1 ml B5 vitamins 1000×, 40 g sucrose [C12H22O11], 0.25 g casein hydrolysate, 0.25 ml BAP, 0.75 g MgCl2*6H20, 20 ml glutamine 25 mg/ml, 0.1g serine [C3H7NO3], 4 ml Asparagine 25 mg/ml and 0.05 ml of IBA 1 mg/ml) Murashige and Skoog Medium (MS) and Gamborg's B-5 media (Bridgen, 1994) may also be used as embryo rescue medium. Embryos can be treated to induce chromosome doubling at this time. (See below for chromosome doubling details.) Isolated embryos remain on embryo rescue medium for 21 to 30 days at 24° C. Embryos may remain in the dark for the entire incubation on ER1-1, they also can be incubated in the dark and later completed in the light, or may spend the entire incubation in the light. There is not a callus induction stage in this protocol, shoots are developed directly from the embryos which allows for faster turnaround time, plantlet survival and better quality results. The above described embryo rescue method involves direct shoot regeneration from embryos, rather than regeneration through embryogenesis, thus making plant recovery quicker (shoot recovery in approximately 2-3 months, compared to reported up to 1 year timeline in the literature). Further, the following protocol does not require culture in the dark following transfer to germination medium nor does the above protocol require a transfer to rooting medium.

[0166] Chromosome doubling treatments: Either colchicine of trifluralin can be used to induce chromosome doubling. Ideally, late heart stage wide cross embryos (or larger) are chemically treated to induce chromosome doubling at any time from immediately following isolation up to 1 week post isolation. The doubling agent can be mixed in either solid or liquid medium and applied for several hours or up to a few days. Trifluralin is used at a concentration of 10-40 uM in either solid or liquid media. Alternatively, colchicine is used at a concentration of 0.4-1 mg/ml in either solid or liquid media. Following chemical treatment, embryos are transferred to fresh embryo rescue medium.

[0167] Shoot regeneration: Developing embryos are transferred from rescue medium to germination medium such as Soy ER GSMv2 (i.e. 3.2g Schenk and Hilderbrandt Basal salt mixture, 1 g Myo-inositol [C6H1206], 5 ml Thiamine 1 mg/ml, 0.5 ml pyridoxine 1 mg/ml, 10 g sucrose [C12H22011], and 7.5g purified agar) for approximately 3 to 5 weeks in the light at 24° C. Alternatively, developing embryos may be transferred from rescue medium to elongation medium such as Soy E1 0 No TCV (i.e. 4.3g MS Basal salt Mixture [MSP01], 5 ml MS iron 200×, 30g Sucrose [C12H22011], 1 g MES [C6H13NO4S], 8 g purified agar, 1 ml B5 vitamins 100×, 2 ml glutamine 25 mg/ml, 0.50 ml zeatin riboside, trans isomers 1 mg/ml, 0.1 ml IAA 1 mg/ml, 0.2 ml GA3 5 mg/ml, 1.5 ml timentin 100 mg/ml, 0.3 ml cefotaxime 250 mg/ml, 0.5 ml vancomycin 100 mg/ml) Shoots can be kept on medium for approximately 3 to 5 weeks in the light at 24° C. Developing shoots may be transferred from media plates to Phytocons containing either germination or elongation medium for further shoot development. Established shoots having suitable roots are moved to soil.

[0168] Ploidy Analysis:

[0169] Ploidy analysis is conducted using a flow cytometer. Leaf tissue for ploidy analysis is collected from small shoots either in culture or after establishment in soil. Tissue is collected on dry ice and stored at −80° C. until analysis, or collected on wet ice and analyzed the same day. A sample size of 0.5 cm² is sufficient. Samples are prepared according to the instructions in the Sysmex kit (Sysmex Inc., Kobe Japan). Each sample set contains an untreated F1 plant (not treated to induce chromosome doubling) as a control.

### Example 4 ASR Resistance Trait Introgression

[0170] Amphidiploid lines generated from the wide cross (i.e. Glycine tomentella crossed with Glycine max) followed by embryo rescue as described in Example 3 were backcrossed multiple times with a recurrent elite Glycine max lines. It is known in the art that multiple backcrosses are needed to generate fertile hybrid lines, in particular the literature suggests that a BC3 generation is necessary. In this case it was determined that an additional backcrosses are necessary, BC4 in the case of G. tomentella x G. max to generate fertile hybrid plants. F1 hybrid plants produced by the methods as described above were created from wide crosses comprising PI441001, PI441008, PI446958, PI583970, and PI483224. F1 plants were next crossed as a female with a male recurrent G. max plant to perform a first backcross (BC1 progeny). BC1 Progeny were further backcrossed for multiple generations (e.g. BC2). BC plants are evaluated for ASR resistance, chromosome numbers and in some cases lines are genotyped through use of molecular markers as described herein to detect the presence of chromosome intervals corresponding to SEQ ID NOs 1-5 or any marker identified in Tables 1-5.

### Example 5 Identification of Two Causative Genes Located within G. tomentella Chromosome 5 Intervals

[0171] Further genotyping of the various G. tomentella intervals led to the discovery of two causative genes for ASR resistance located on chromosome 5 within the disclosed intervals. A first gene type encodes a TNLW R-gene motif and is depicted in SEQ ID NOs 6 and 30 located from PI441001 and PI583970 respectively. A second gene type located in the discovered intervals encodes a CNL R-gene motif and is depicted in SEQ ID NOs 9, 12, 15, 18, 21, 24, and 27. It is contemplated that any of these genes or homologs thereof can be employed in a transgenic, gene editing or breeding method utilizing embryo rescue as described above to generate plants having increased resistance to ASR.

### Example 6 Construction of Vectors Comprising R-Genes

[0172] Constructs were generated comprising each of the R-genes described in Example 5 above.

[0173] a) Vector Construction for R-Gene Comprising SEQ ID NO: 6

[0174] Vector type: Binary Vector

[0175] Construct Size (bp): 30,982

[0176] Functional description: A binary vector for soybean transformation with ALS selection, harboring gGtoRG1-01, a candidate soy rust resistance gene encoding a protein containing Toll/Interleukin-1 receptor (TIR), nucleotide-binding site (NBS), leucine rich-repeat (LRR), and WKRY domains syntenic to Glyma.05G165800 (Soy_william82_v2).

[0177] Cloning methods: GenScript synthesized RG1 as four fragments RG1-PartI, -PartII, -PartIII and -PartIV [U9490BJ270-1 (23950), U9490BJ270-2 (23952), U9490BJ270-3 (23953), and U9490BJ270-4 (23954)]. The first and last 2 fragments were cloned into the bridge vector 21177 through SanDI/ScaI, ScaI/RsrII, respectively to obtain the intermediates 21177-PartI+II and 21177 Part-III+IV. Then the PartI+II (SanDI/ScaI), PartIII+IV (ScaI/RsrII) in the two intermediates were all cloned into 22296 at once through three way ligation at SanDI site of 22296. The positive clone was confirmed by digestion with Alw441/NheI/SalI and by sequencing over the cloning junctions (SYN04455:65-78).

[0178] Sequences used include SEQ ID NO. 6 (coding sequence), SEQ ID NO. 7 (promoter) and SEQ ID NO. 8 (terminator). SEQ ID NO: 6 encodes the protein of SEQ ID NO: 47.

[0179] b) Vector Construction for R-Gene comprising SEQ ID NO: 9

[0180] Vector type: Binary Vector

[0181] Construct Size (bp): 17,713

[0182] Functional description: A binary vector for soybean transformation with the ALS selection harboring a soy rust resistance candidate gene that encodes a protein containing coiled-coiled (CC), nucleotide-binding site (NBS), and leucine rich repeat (LRR) domains. The gene is syntenic to Glyma.05G165600 (Soy_william82_v2).

[0183] Cloning methods: GenScript synthesized RG2 as two fragments PartI (SanDI/SacI, U1935CD120-1,24076) and PartII (SacI/RsrII, U1935CD120-2, 24077), and ligated into 22296 at SanDI. The positive clone was confirmed by digestion with Alw441/EcoRI and by sequencing over the cloning junctions (SYN04455:151-153)

[0184] Sequences used include SEQ ID NO. 9 (coding sequence), SEQ ID NO. 10 (promoter) and SEQ ID NO. 11 (terminator). SEQ ID NO: 9 encodes the protein of SEQ ID NO: 48.

[0185] c) Vector Construction for R-Gene Comprising SEQ ID NO: 12

[0186] Vector type: Binary Vector

[0187] Functional Description A binary vector for soybean transformation with glyphosate (EPSPS) selection harboring a soy rust resistance candidate gene from G. tomentella PI583970 that encodes a protein containing coiled-coiled (CC), nucleotide-binding site (NBS), and leucine rich repeat (LRR) domains expressed with native G. tomentella promoter and terminator(genomic DNA). The gene is syntenic to Glyma.05G165600 (Soy_william82_v2).

[0188] Sequences used include SEQ ID NO. 12 (coding sequence), SEQ ID NO. 13 (promoter) and SEQ ID NO. 14 (terminator). SEQ ID NO. 12 encodes the protein of SEQ ID NO: 42.

[0189] d) Vector Construction for R-Gene Comprising SEQ ID NO: 15

[0190] Vector type: Binary Vector

[0191] Construct Size (bp): 14,706

[0192] Functional description: Binary vector for soybean transformation with glyphosate selection (EPSPS), harboring a soy rust resistance candidate gene from Glycine tomentella (PI583970), cGtoRG13-01, encoding a protein containing coiled-coiled (CC), nucleotide-binding site (NBS), and leucine rich repeat (LRR) domains and driven by a soybean GmUbi promoter and Arabidopsis terminator plus a soybean kozak. The candidate gene is syntenic to Glyma.05G165600 (Soy_william82_v2).

[0193] Cloning methods: Site mutagenized U3962BF220-1 (prGmUBI1) so that the promoter fragment can be cut out using SanDI and BamHI (U1466CH300_6 by Genscript). Synthesized cGtoRG13 as a BamHI-SacI fragment (G519921, U1466CH300_6 by Genscript), cut out the fragment. Three way ligation into 23899 between SanDI and SacI sites to get VC21449 New (SYN03277: 183). Verified the construct by digestion using SalI and ApaLI as well as by HincII alone, followed by sequencing (SYN03277:184-185).

[0194] Sequences used include SEQ ID NO. 15 (coding sequence), SEQ ID NO. 16 (prGmUbi1-01 Native Ubiquitin 1 promoter from soybean; Accession D16248.1) and SEQ ID NO. 8 (Terminator tAtUBQ3-02 A at 328 bp from tAtUbq3-01 (Arabidopsis Ubq3 3′-UTR). SEQ ID NO: 15 encodes the protein of SEQ ID NO: 43.

[0195] e) Vector Construction for R-Gene Comprising SEQ ID NO: 18

[0196] Vector type: Binary Vector

[0197] Functional Description A binary vector for soybean transformation with glyphosate (EPSPS) selection harboring a soy rust resistance candidate gene from G. tomentella PI583970 that encodes a protein containing coiled-coiled (CC), nucleotide-binding site (NBS), and leucine rich repeat (LRR) domains expressed with Medicago truncatula promoter and Arabidopsis termintor plus a soybean kozak. The gene is syntenic to Glyma.05G165600 (Soy_william82_v2).

[0198] Cloning Instructions See VC21449 . . . replace prGmUbi1-01 with prMt51186-03 promoter. Ligate as SanDI/RsrII gene cassette to the SanDI site of 23614. Or if possible swap promoter directly from binary (SanDI/BamHI) vector made in VC21449.

[0199] Sequences used include SEQ ID NO. 18 (coding sequence), SEQ ID NO. 19 (Promoter prMt51186-03 The promoter from the Medicago truncatula gene identified by the GeneChip probe ID Mtr.51186.1.S1) and SEQ ID NO. 20 (Terminator Arabidopsis Ubiquitin UTR). SEQ ID NO: 18 encodes the protein of SEQ ID NO: 49.

[0200] f) Vector Construction for R-Gene Comprising SEQ ID NO: 21

[0201] Vector type: Binary Vector

[0202] Construct Size (bp): 16,801

[0203] Functional description: Binary vector for soybean transformation with Glyphosate selection (cmEPSPS), harboring a genomic fragment derived from Glycine tomentella (PI446958), gGtoRG11-01, to express a soy rust resistance candidate gene encoding a protein containing a coiled-coil, nucleotide binding site, and leucine-rich repeat domain (CC-NBS-LRR) The soy rust resistance gene is syntenic to Glyma.05G65600 (Soy_williams82 v2).

[0204] Cloning methods: Digested U8867CG170-1 with SanDI/SacI to obtain RG11-PartI fragment (4899 bp), Digested U8867CG170-2 with SacI/RsrII/Eam1105I to obtain RG11-PartII fragment (2609 bp), ligated these two fragments onto 20660 at SanDI site. The resulting construct VC21209 was confirmed by digestion with Alw441/EcoRI/Bsp119I and by sequencing over the cloning junctions. (SYN04456:102-105). The resulting construct is 24160.

[0205] Sequences used include SEQ ID NO. 21 (coding sequence), SEQ ID NO. 22 (promoter) and SEQ ID NO. 23 (terminator). SEQ ID NO: 21 encodes the protein of SEQ ID NO: 44.

[0206] a) Vector Construction for R-Gene Comprising SEQ ID NO: 24

[0207] Vector type: Binary Vector

[0208] Functional Description Binary vector for soybean transformation to express the soy rust resistance candidate gene, cGtoRG11Ver221F, which encodes a protein containing a coiled-coil, nucleotide binding site, and leucine-rich repeat domain (CC-NBS-LRR). This gene is syntenic to Glyma.05G65600 (Soy_williams82 v2) and is derived from Glycine tomentella (PI446958) contig 221F allele, gGtoRG11-01. Expression is driven by the soybean Ubi1 promoter and Arabidopsis Ubq3 terminator. Vector utilizes Glyphosate selection (cmEPSPS).

[0209] Cloning Instructions Digest synthetic coding sequence (remove internal SacI site) with BamHI/SacI and ligate to the BamHI/SacI site of binary vector 24171 to replace the current CNL gene.

[0210] Note: promoter and terminator are the same as construct 24171

[0211] Sequences used include SEQ ID NO. 24 (coding sequence), SEQ ID NO. 25 (promoter) and SEQ ID NO. 26 (terminator). SEQ ID NO: 24 encodes the protein of SEQ ID NO: 45.

[0212] h) Vector Construction for R-Gene Comprising SEQ ID NO: 27

[0213] Vector type: Binary Vector

[0214] Allelic to CNL found in construct 24160. Identified by High Fidelity PCR amplification from PI446958 genomic DNA. Notebook Ref. SY04474:53

Forward Primer:
GGATTATGTTTATATTCGAGTACATGCTATTGC
Reverse Primer:
GGGATTCAAAGGCATCTTAGATTAGTCAAACATCC

[0215] Melting Temp: 98° C.

[0216] Annealing Temp: 58° C.

[0217] Elongation Temp: 72° C.

[0218] 35 Cycles

[0219] PCR product was purified by agarose gel electrophoresis then sub-cloned into TOPO clone (PCR Blunt) vectors. Individual E. coli colonies were isolated on Kanamycin-LB selection media. Plasmid preps were prepared and the inserts sequenced.

[0220] Functional Description Binary vector for soybean transformation to express a soy rust resistance candidate gene, cGtoRG11Ver1F, which encodes a protein containing a coiled-coil, nucleotide binding site, and leucine-rich repeat domain (CC-NBS-LRR). This gene is syntenic to Glyma.05G65600 (Soy_williams82 v2) and is derived from Glycine tomentella (PI446958) contig 1F allele, similar to that of gGtoRG11-01. Expression is driven by the soybean Ubi1 promoter and Arabidopsis Ubq3 terminator. Vector utilizes Glyphosate selection (cmEPSPS).

[0221] Sequences used include SEQ ID NO. 27 (coding sequence), SEQ ID NO. 28 (promoter) and SEQ ID NO. 29 (terminator). SEQ ID NO: 27 encodes the protein of SEQ ID NO: 46.

[0222] i) Vector Construction for R-Gene Comprising SEQ ID NO: 30

[0223] Vector type: Binary Vector

[0224] Functional description: A binary vector for soybean transformation with ALS selection, haboring a candidate soy rust resistance gene encoding a protein containing a Toll-interleukin-like receptor (TIR), nucleotide binding site (NBS), leucine-rich repeat (LRR), WKRY domains syntenic to Glyma.05G165800 (Soy_william82_v2).

[0225] Cloning methods: GenScript synthesized RG5 as four fragments RG5-PartI, -PartII, -PartIII and -PartIV [U9490BJ270-5 (23955), U9490BJ270-6 (23956), U9490BJ270-7 (23957), and U9490BJ270-8 (23958)]. The first 3 fragments were cloned into the bridge vector 21177 as SanDI+Kpn2I respectively to obtain the intermediate 21177-PartI+II+III. Then the PartI+II+III (SanDI/Kpn2I) from this intermediate vector and PartIV (Kpn2I/RsrII) were all cloned into 22296 at once through three way ligation at SanDI site of 22296. The positive clone was confirmed by digestion with NcoI/HindIII and by sequencing over the cloning junctions (SYN04455:65-78).

[0226] Sequences used include SEQ ID NO. 30 (coding sequence), SEQ ID NO. 31 (promoter) and SEQ ID NO. 32 (terminator). SEQ ID NO: 30 encodes the protein of SEQ ID NO: 50.

### Example 7 Validation of R-Genes Against ASR

[0227] Validation of Molecular Assay Using Fungal b-Tubulin's Transcripts as Measurement of Resistance

[0228] In our phenotyping work, we have used both symptom evaluation and molecular assays for rust resistance or susceptibility ratings. The symptom evaluation is a modified version of a rust rating scale from Burdon and Speer, T A G, 1984. The molecular assay is based on a fungal housekeeping gene, b-tubulin, identified by a Syngenta scientist, the probe for b-tubulin targets a specific region in soy rust but not in other pathogens or plant species. Further we validated this molecular assay coupled with phenotypic symptomatic observations as shown in FIG. 9 and FIG. 1. FIG. 9, from left to right, top to bottom, depicts complete resistance (Rpp1 line), a few lesions without sporulation (Rpp5 lines), lots of lesions with little sporulations (Rpp6 line), many lesions with some Tan lesions plus sporulations (Rpp2 lines), to many Tan leasions with profuse sporulations (Rpp4, Rpp1b and Jack). Because the rust used in this example is virulent on Rpp4 and Rpp1b, these 2 lines show susceptibility as severe as the susceptible check, Jack.

[0229] Consistent with these observations, measurements taken using fungal b-tubulin transcripts shown in the graph of FIG. 1, from left to right, no detection of the transcripts (complete resistance, Rpp1 line), barely detectable level of transcripts (a few lesion without sporulation, Rpp5 and Rpp6 lines), low level of transcripts (lots of lesions with little sporulations, Rpp6 line), intermediate level of transcripts (many lesions with some Tan lesions/sporulations, Rpp2 lines), high level of transcripts (many Tan leasions with profuse sporulations, Rpp4, Rpp1b and Jack (CK) lines).

[0230] From these data sets, we have shown that a molecular assay using fungal b-tubulin or other housekeeping genes is as reliable and indicative as phenotypic symptomatic ratings, and provides higher resolution than phenotypic ratings based on symptoms.

[0231] Validation of Transient Foliar Gene Expression System Using Known Soy Rust R Gene

[0232] A transient detached split-leaf assay was developed to validate rust resistance. This was accomplished by using a susceptible soybean, or its wild relatives, leaf and transiently expressing a GUS control vector on one side of the leaf and transiently expressing a vector containing an R-gene on the other side of the leaf (i.e. the leaf midrib being the divider, further the control and experimental vectors being similar except for the respective CDS (GUS or R-gene)). After 2-3 days of infiltration, leaves were sprayed with rust. At about 10-17 days, infiltrated leaves were selected and cut in half by the mid-vein divider. Left side (top view) of each leaf with only infiltrated area was cut out and filled in 1 well in a 96 well block, labeled as construct left-1. The right side (top view) of the leaf was cut out and filled in one well, the right half leaf filled the other, 8 pair of wells per construct. In each experiment, the right side of the leaves was infiltrated with construct containing GUS, while the left side was infiltrated with the constructs of interests. For GUS check, it means both sides of the leaf were infiltrated with constructs containing GUS. All of them were analyzed for fungal biomass measurement using quantitative polymerase chain reaction of fungal b-tubulin transcripts.

[0233] First we validated the system with GUS (in construct 17282) as negative check and CcRpp1 (soy rust R gene from Cajanus cajan in construct 23677). The CcRpp1 showed near 100% disease control in stable transgenic soybean when in homozygous state and protein level reach certain level (Kawashima et al., 2016 for soy rust resistance from pigeon pea). It is appropriate to be used as positive control for system validation. Both GUS and CcRpp1 constructs were co-infiltrated with construct 18515, a CFP construct for transformation efficiency measurement.

[0234] In quantitative reverse transcript polymerase chain reactions, three ways to process the data using transcripts of fungal b-tubulin and CFP. One could use CFP as transformation efficiency measurement. In this setting, the formula in FIG. 2 was used.

[0235] As shown in FIG. 3, construct containing CcRpp1 has significant less normalized fungal biomass accumulation compared to construct containing GUS at 95% confidence, while GUS check is not significant different from 1 which means amount of fungal biomass accumulated from two sides infiltrated with GUS are not statistically different. While the construct containing CcRpp1 infiltrated half leaves produced significantly less amount compared to the side infiltrated with construct containing GUS. This experiment was repeated once, and similar results obtained. In all experiments, a Syngenta elite line or Glycine canescens line was used. From this experiment, one with ordinary skill could argue that other soybean lines or close related legumes could be used as well.

[0236] We also tested the system without CFP transformation efficiency control. In this experiment, we compared constructs containing GUS, CcRpp1, and CNL from 583970 (construct 24230). 24230 is derived from genomic DNA amplied using primers designed from contigs 819F containing coiled-coiled nucleotide binding and leucine rich repeat (CNL). In this experiment, we tested if CFP transformation efficiency check can be skipped or not. Because there is not CFP in this experiment, the formula in FIG. 4 was used to process the transcript data for any given constructs.

[0237] As shown in FIG. 5, both CcRpp1 and 24230 (SEQ ID NO: X) showed efficacy in rust resistance when compared to GUS negative check. But surprisingly, the 24230 appears more efficacious than CcRpp1. This may be due to the fact that CcRpp1 expression level is not sufficiently high to confer full resistance as it does in stable transgenics. However, it does reinforce the observation that the split leaf foliar expression is sufficient to detect resistance function.

[0238] We further tested other GUS construct as negative control. In this experiment, construct 21349 (GUS), and 24230 (CNL R gene from PI 583970, SEQ ID NO: X) were used. As shown in FIG. 6, two sets of samples derived from 24230 are lower in fungal biomass than 21349. In this setting, we compared fungal b-tubulin from the side infiltrated with construct of interest directly to the other side infiltrated with construct containing GUS without normalization, except the value of transcript reads were processed by Log 2. Again the side infiltrated with construct 24230 showed significantly lower fungal biomass than the side infiltrated with construct containing GUS.

[0239] We also tested another construct, 23969 together with GUS check. 23969 contains another candidate gene in the chr 5 interval, encoding Toll inter-leukin nucleotide binding and leucine rich repeat protein with WRKY domain (TNLW). This resistance conferred by the gene in this construct is evident as indicated by significantly lower level of fungal biomass than GUS negative check (FIG. 6).

[0240] Stable Transformation with ASR Candidate Gene Vectors

[0241] Agrobacterium tumefaciens strains containing individual binary vector with PAT, ALS or EPSPS selectable marker gene and one or more of the soybean rust resistance candidate genes was transformed into explants prepared from imbibed soybean seeds as prepared by method described here (Khan 2004, U.S. Patent Application Publication No. 20040034889). Soybean seeds were selected from Jack, Williams 82 or a Syngenta elite variety such as 06KG 218440. FIGS. 7 and 8 show the data for stable transformants at the T1 (SEQ ID NO: 21) and T0 stage (SEQ ID NO: 27).

[0242] From the above data set, we have a reason to believe that both genes in the interval, CNL and TNLW, confer resistance to soybean rust. It would be reasonable to stack them to examine the resistance conferred by both genes together, a stronger resistance could be expected.

[0243] The above examples clearly illustrate the advantages of the invention. Although the present invention has been described with reference to specific details of certain embodiments thereof, it is not intended that such details should be regarded as limitations upon the scope of the invention except as and to the extent that they are included in the accompanying claims.

[0244] Throughout this application, various patents, patent publications and non-patent publications are referenced. The disclosures of these patents, patent publications and non-patent publications in their entireties are incorporated by reference herein into this application in order to more fully describe the state of the art to which this invention pertains.

[0245] From the above data set, we have a reason to believe that both genes in the interval, CNL and TNLW, confer resistance to soybean rust. It would be reasonable to stack them to examine the resistance conferred by both genes together, a stronger resistance could be expected.

[0246] The above examples clearly illustrate the advantages of the invention. Although the present invention has been described with reference to specific details of certain embodiments thereof, it is not intended that such details should be regarded as limitations upon the scope of the invention except as and to the extent that they are included in the accompanying claims.

[0247] Throughout this application, various patents, patent publications and non-patent publications are referenced. The disclosures of these patents, patent publications and non-patent publications in their entireties are incorporated by reference herein into this application in order to more fully describe the state of the art to which this invention pertains.

The application's sequence listing, which the Patent Office published only in electronic form, follows.

SEQUENCE LISTING (50 sequences)

SEQ ID NO: 1 - DNA, 1251375 bp, Glycine tomentella
  misc_feature (3743)..(3743): n is a, c, g, or t
  misc_feature (6487)..(6487): n is a, c, g, or t
  misc_feature (6714)..(6843): n is a, c, g, or t
  misc_feature (13645)..(13654): n is a, c, g, or t
  misc_feature (18350)..(18350): n is a, c, g, or t
  misc_feature (18754)..(18802): n is a, c, g, or t
  misc_feature (24574)..(24583): n is a, c, g, or t
  misc_feature (25088)..(25097): n is a, c, g, or t
  misc_feature (32135)..(32193): n is a, c, g, or t
  misc_feature (35152)..(35152): n is a, c, g, or t
  misc_feature (43433)..(43433): n is a, c, g, or t
  misc_feature (44013)..(44022): n is a, c, g, or t
  misc_feature (65324)..(65956): n is a, c, g, or t
  misc_feature (73652)..(73758): n is a, c, g, or t
  misc_feature (74056)..(74065): n is a, c, g, or t
  misc_feature (83516)..(83655): n is a, c, g, or t
  misc_feature (96213)..(96223): n is a, c, g, or t
  misc_feature (98450)..(98461): n is a, c, g, or t
  misc_feature (100615)..(100751): n is a, c, g, or t
  misc_feature (104079)..(104158): n is a, c, g, or t
  misc_feature (105730)..(105730): n is a, c, g, or t
  misc_feature (137451)..(137456): n is a, c, g, or t
  misc_feature (149132)..(149203): n is a, c, g, or t
  misc_feature (161633)..(161642): n is a, c, g, or t
  misc_feature (162469)..(162911): n is a, c, g, or t
  misc_feature (163331)..(163331): n is a, c, g, or t
  misc_feature (165117)..(165210): n is a, c, g, or t
  misc_feature (165516)..(165569): n is a, c, g, or t
  misc_feature (189362)..(189372): n is a, c, g, or t
  misc_feature (189972)..(189981): n is a, c, g, or t
  misc_feature (190341)..(190350): n is a, c, g, or t
  misc_feature (207000)..(207000): n is a, c, g, or t
  misc_feature (245708)..(247592): n is a, c, g, or t
  misc_feature (249191)..(249200): n is a, c, g, or t
  misc_feature (250659)..(251395): n is a, c, g, or t
  misc_feature (253730)..(253989): n is a, c, g, or t
  misc_feature (262458)..(262458): n is a, c, g, or t
  misc_feature (270839)..(270949): n is a, c, g, or t
  misc_feature (275550)..(281035): n is a, c, g, or t
  misc_feature (281436)..(283402): n is a, c, g, or t
  misc_feature (293342)..(293767): n is a, c, g, or t
  misc_feature (295911)..(295920): n is a, c, g, or t
  misc_feature (296558)..(296726): n is a, c, g, or t
  misc_feature (302530)..(302530): n is a, c, g, or t
  misc_feature (314836)..(314915): n is a, c, g, or t
  misc_feature (315503)..(317023): n is a, c, g, or t
  misc_feature (326664)..(326850): n is a, c, g, or t
  misc_feature (340015)..(340015): n is a, c, g, or t
  misc_feature (360998)..(361007): n is a, c, g, or t
  misc_feature (363072)..(363100): n is a, c, g, or t
  misc_feature (368600)..(368911): n is a, c, g, or t
  misc_feature (369248)..(369294): n is a, c, g, or t
  misc_feature (370605)..(370649): n is a, c, g, or t
  misc_feature (378006)..(378736): n is a, c, g, or t
  misc_feature (379037)..(379046): n is a, c, g, or t
  misc_feature (383621)..(383630): n is a, c, g, or t
  misc_feature (384720)..(384729): n is a, c, g, or t
  misc_feature (390771)..(390952): n is a, c, g, or t
  misc_feature (409988)..(409997): n is a, c, g, or t
  misc_feature (410222)..(410222): n is a, c, g, or t
  misc_feature (415207)..(415207): n is a, c, g, or t
  misc_feature (428722)..(428731): n is a, c, g, or t
  misc_feature (429005)..(429014): n is a, c, g, or t
  misc_feature (431398)..(431647): n is a, c, g, or t
  misc_feature (432669)..(432678): n is a, c, g, or t
  misc_feature (446511)..(446511): n is a, c, g, or t
  misc_feature (447589)..(447604): n is a, c, g, or t
  misc_feature (447908)..(447917): n is a, c, g, or t
  misc_feature (448306)..(448315): n is a, c, g, or t
  misc_feature (448873)..(448882): n is a, c, g, or t
  misc_feature (450596)..(450605): n is a, c, g, or t
  misc_feature (453870)..(453901): n is a, c, g, or t
  misc_feature (454222)..(454467): n is a, c, g, or t
  misc_feature (454683)..(454820): n is a, c, g, or t
  misc_feature (457674)..(457733): n is a, c, g, or t
  misc_feature (470043)..(470052): n is a, c, g, or t
  misc_feature (470602)..(470602): n is a, c, g, or t
  misc_feature (493592)..(493605): n is a, c, g, or t
  misc_feature (502875)..(502989): n is a, c, g, or t
  misc_feature (511381)..(511381): n is a, c, g, or t
  misc_feature (523112)..(523158): n is a, c, g, or t
  misc_feature (527058)..(527523): n is a, c, g, or t
  misc_feature (543294)..(543303): n is a, c, g, or t
  misc_feature (544118)..(544127): n is a, c, g, or t
  misc_feature (546836)..(546845): n is a, c, g, or t
  misc_feature (547275)..(547284): n is a, c, g, or t
  misc_feature (567418)..(567477): n is a, c, g, or t
  misc_feature (569163)..(569163): n is a, c, g, or t
  misc_feature (572499)..(572508): n is a, c, g, or t
  misc_feature (573364)..(573373): n is a, c, g, or t
  misc_feature (574731)..(574741): n is a, c, g, or t
  misc_feature (578302)..(578967): n is a, c, g, or t
  misc_feature (587637)..(587646): n is a, c, g, or t
  misc_feature (588256)..(588265): n is a, c, g, or t
  misc_feature (590249)..(590249): n is a, c, g, or t
  misc_feature (592172)..(592177): n is a, c, g, or t
  misc_feature (595059)..(595068): n is a, c, g, or t
  misc_feature (597493)..(597547): n is a, c, g, or t
  misc_feature (599073)..(599455): n is a, c, g, or t
  misc_feature (601068)..(601077): n is a, c, g, or t
  misc_feature (602150)..(602334): n is a, c, g, or t
  misc_feature (606659)..(606659): n is a, c, g, or t
  misc_feature (612248)..(612656): n is a, c, g, or t
  misc_feature (619059)..(619091): n is a, c, g, or t
  misc_feature (628824)..(629230): n is a, c, g, or t
  misc_feature (633011)..(633057): n is a, c, g, or t
  misc_feature (634196)..(634283): n is a, c, g, or t
  misc_feature (634585)..(634658): n is a, c, g, or t
  misc_feature (635865)..(636221): n is a, c, g, or t
  misc_feature (644747)..(644747): n is a, c, g, or t
  misc_feature (655918)..(656003): n is a, c, g, or t
  misc_feature (661088)..(661088): n is a, c, g, or t
  misc_feature (678040)..(678097): n is a, c, g, or t
  misc_feature (678825)..(678834): n is a, c, g, or t
  misc_feature (686932)..(686955): n is a, c, g, or t
  misc_feature (687863)..(687872): n is a, c, g, or t
  misc_feature (691642)..(691651): n is a, c, g, or t
  misc_feature (702555)..(703199): n is a, c, g, or t
  misc_feature (714512)..(714512): n is a, c, g, or t
  misc_feature (715825)..(715825): n is a, c, g, or t
  misc_feature (718065)..(718732): n is a, c, g, or t
  misc_feature (721041)..(721050): n is a, c, g, or t
  misc_feature (721388)..(721397): n is a, c, g, or t
  misc_feature (723554)..(724707): n is a, c, g, or t
  misc_feature (745125)..(745138): n is a, c, g, or t
  misc_feature (749380)..(749432): n is a, c, g, or t
  misc_feature (754527)..(754707): n is a, c, g, or t
  misc_feature (761330)..(761515): n is a, c, g, or t
  misc_feature (768966)..(770481): n is a, c, g, or t
  misc_feature (770845)..(771375): n is a, c, g, or t
  misc_feature (774465)..(774465): n is a, c, g, or t
  misc_feature (783479)..(783488): n is a, c, g, or t
  misc_feature (793021)..(793515): n is a, c, g, or t
  misc_feature (795231)..(795231): n is a, c, g, or t
  misc_feature (804966)..(805735): n is a, c, g, or t
  misc_feature (809268)..(809287): n is a, c, g, or t
  misc_feature (812169)..(812366): n is a, c, g, or t
  misc_feature (813540)..(813789): n is a, c, g, or t
  misc_feature (818473)..(818473): n is a, c, g, or t
  misc_feature (823670)..(823679): n is a, c, g, or t
  misc_feature (824379)..(827421): n is a, c, g, or t
  misc_feature (836107)..(836116): n is a, c, g, or t
  misc_feature (836874)..(836877): n is a, c, g, or t
  misc_feature (846128)..(846239): n is a, c, g, or t
  misc_feature (846480)..(846627): n is a, c, g, or t
  misc_feature (854333)..(854411): n is a, c, g, or t
  misc_feature (855187)..(855187): n is a, c, g, or t
  misc_feature (875776)..(875938): n is a, c, g, or t
  misc_feature (877463)..(877586): n is a, c, g, or t
  misc_feature (887712)..(887721): n is a, c, g, or t
  misc_feature (888022)..(888031): n is a, c, g, or t
  misc_feature (888428)..(888438): n is a, c, g, or t
  misc_feature (903022)..(903047): n is a, c, g, or t
  misc_feature (912811)..(912830): n is a, c, g, or t
  misc_feature (913156)..(913627): n is a, c, g, or t
  misc_feature (926097)..(926119): n is a, c, g, or t
  misc_feature (929073)..(929120): n is a, c, g, or t
  misc_feature (931777)..(931873): n is a, c, g, or t
  misc_feature (935381)..(935535): n is a, c, g, or t
  misc_feature (936097)..(936097): n is a, c, g, or t
  misc_feature (942845)..(942858): n is a, c, g, or t
  misc_feature (947497)..(947497): n is a, c, g, or t
  misc_feature (947620)..(948264): n is a, c, g, or t
  misc_feature (956184)..(956184): n is a, c, g, or t
  misc_feature (962446)..(962890): n is a, c, g, or t
  misc_feature (963186)..(963202): n is a, c, g, or t
  misc_feature (980050)..(980059): n is a, c, g, or t
  misc_feature (981369)..(981378): n is a, c, g, or t
  misc_feature (982731)..(982740): n is a, c, g, or t
  misc_feature (986698)..(987669): n is a, c, g, or t
  misc_feature (1000301)..(1000310): n is a, c, g, or t
  misc_feature (1001080)..(1001089): n is a, c, g, or t
  misc_feature (1008462)..(1008488): n is a, c, g, or t
  misc_feature (1008895)..(1008904): n is a, c, g, or t
  misc_feature (1010738)..(1010754): n is a, c, g, or t
  misc_feature (1022521)..(1022530): n is a, c, g, or t
  misc_feature (1024016)..(1024161): n is a, c, g, or t
  misc_feature (1031659)..(1031738): n is a, c, g, or t
  misc_feature (1032206)..(1032252): n is a, c, g, or t
  misc_feature (1036936)..(1037070): n is a, c, g, or t
  misc_feature (1044647)..(1045077): n is a, c, g, or t
  misc_feature (1045394)..(1045403): n is a, c, g, or t
  misc_feature (1049870)..(1050527): n is a, c, g, or t
  misc_feature (1066869)..(1066879): n is a, c, g, or t
  misc_feature (1069789)..(1069789): n is a, c, g, or t
  misc_feature (1070584)..(1070712): n is a, c, g, or t
  misc_feature (1085567)..(1085567): n is a, c, g, or t
  misc_feature (1087330)..(1087330): n is a, c, g, or t
  misc_feature (1095614)..(1096508): n is a, c, g, or t
  misc_feature (1100946)..(1100946): n is a, c, g, or t
  misc_feature (1108127)..(1108174): n is a, c, g, or t
  misc_feature (1119361)..(1119499): n is a, c, g, or t
  misc_feature (1127353)..(1127548): n is a, c, g, or t
  misc_feature (1155325)..(1155359): n is a, c, g, or t
  misc_feature (1162753)..(1162762): n is a, c, g, or t
  misc_feature (1163179)..(1163188): n is a, c, g, or t
  misc_feature (1163475)..(1163484): n is a, c, g, or t
  misc_feature (1168942)..(1168942): n is a, c, g, or t
  misc_feature (1170213)..(1170436): n is a, c, g, or t
  misc_feature (1170864)..(1170989): n is a, c, g, or t
  misc_feature (1171415)..(1171424): n is a, c, g, or t
  misc_feature (1173346)..(1173355): n is a, c, g, or t
  misc_feature (1175182)..(1175191): n is a, c, g, or t
  misc_feature (1177365)..(1177826): n is a, c, g, or t
  misc_feature (1183611)..(1183620): n is a, c, g, or t
  misc_feature (1185130)..(1185188): n is a, c, g, or t
  misc_feature (1190399)..(1190399): n is a, c, g, or t
  misc_feature (1192503)..(1192599): n is a, c, g, or t
  misc_feature (1192893)..(1193051): n is a, c, g, or t
  misc_feature (1194932)..(1195230): n is a, c, g, or t
  misc_feature (1195546)..(1195555): n is a, c, g, or t
  misc_feature (1199449)..(1199456): n is a, c, g, or t
  misc_feature (1201520)..(1201520): n is a, c, g, or t
  misc_feature (1202167)..(1202176): n is a, c, g, or t
  misc_feature (1205971)..(1205980): n is a, c, g, or t
  misc_feature (1206280)..(1206289): n is a, c, g, or t
  misc_feature (1211089)..(1211518): n is a, c, g, or t
  misc_feature (1212969)..(1212979): n is a, c, g, or t
  misc_feature (1214399)..(1215631): n is a, c, g, or t
  misc_feature (1216477)..(1217124): n is a, c, g, or t
  misc_feature (1225086)..(1225303): n is a, c, g, or t
  misc_feature (1226695)..(1226695): n is a, c, g, or t
  misc_feature (1229361)..(1229520): n is a, c, g, or t
  misc_feature (1232721)..(1232730): n is a, c, g, or t
  misc_feature (1233169)..(1233178): n is a, c, g, or t
  misc_feature (1241251)..(1241844): n is a, c, g, or t
  misc_feature (1242127)..(1242171): n is a, c, g, or t
  misc_feature (1247914)..(1248947): n is a, c, g, or t
tcggaaatgctaaaattaccgacagaattttgtccgtcggaaatttccgacggataattccgtgggtaatttccgacggaaatatccgtcggaaattaccgacggccatatccgtcggaaattacccacggaaatatccgtcggaaatgctaaaattaccgacggaattttgtccgtcgaaaattttcgacggataattccgtgggtaattttcgacggaaatatccgtcggaaaatccgtcagaaattgaattattttccacggtataattaccgacggccatttccgtcggtaatataaatatttccgatggaatttttccgacggaaaataatctgtcggaaattactttccgtcggaaaaatccgtcggaaatgctgaaatttccgacggatttttgtccgtcggaaaaattccgtcggaaatagctttattttttgtagtgaaatggtggttagcaatgatagacatctattgcaatcagtaagtgtttgaggtctaccatatgctatatcattaatggacaggatttagctagcattccttataaagtgaccatgattttgacttctctctgttgccttgtgatgatacttttttcatgcaagcatgtggaagcaattattgttgctattatagtcgaaaagaaattatgttagatttgtggcctcaaaacaacatcctaattatgtctcttttagaagtataatgttgagcagtctcgcagaattatttcgtatatatgcatgtctaagaatatgatgtaaacacactgtctaattactttgcagcacaaaaatgttttttttataacagatttacattgataacaatatttttttaaacattgagataaacattttctattggttgttatataataactgatttcgaaaacacttaaattttagattgattgtattaaaaatttgacatagaaagtacattgatctagaatgtggacactctttacaactttcgaattttttggcaagaatttataatatggtggtatagtaaaccaattttggaaaaaacttttcacatccattcttcgtataaccaatttagattgttgataatttttttcatatttttcattttttacaaaactttttaagtcgattgtgctaagaactaatttagattttttttttctttttaaattgattattagtccagccaatccacaaaatccaatataagttttatgatttcagtaacaaattcctattttcactccaattttttaaccctcttctctagtacgtaagacgaatccaagtttctttggcaaaagtattttcaaacttacattgaagatctacgccccaacaacattgatcatcttcttatatatgattatgattccttcattggctgatacaagtattgtagggtgggatgaaaggatagtaatgtttatagatttgaacaggtgatgttgtgggttctttgatgcaagggttggggtactccttgtaccctctatccatttgtctaataaaattattatttgctgataaaaaaaatataagtatgactccaatacttgttttttttttatatatacatttctccattttcatttttctgaatgtttactgttcttgggtgaatttgtattttaaaacctgacctcattcattaggtgttattatatatgcaactgtatgagataatcttctctctctctgattctataattataacttcactttcaaattatagcctttctctttgtttcaaaccctgaccttgttatatgtttctctcttttaaatttaattttaatttaagagagaagtatgattttttatttttatttttttccttctataactaattaagtgctttttgagaaatttaagaaaactaatccatagcgtatttatgataataaattccttgaaatgggggtccaatatatttaaatttttaaacacgttttttttttctcttttaaaaatcccatttaaattgagttcgtacatttatggcttgcatttcaactccattcttgcattgcatggtcctttcgtttcttgtcttggttgcggagtcaacaagtaaagacgtgctgggtaatgggcatgattgacttgtgtgggagaaagaaaaatactctctcggtgactagtgtgttcatgttctgaagtactaaattatgcaacatttggttgatatcatgtacaatggttttgccaaacctctaaaaagctaagattattttgtcggcttcctggtaagttggccccctaaagtttatcattctgttttttcagttcatattctaagcctttattacacggtcacatgctgctatgggcaattttgcttccaaaggttagtataagatttctagcttttattaaaacatgatcatgaacgcaattcctatgccactaatgaacaagtttaaagtttgtgagtgcaatgcaagaatgtcaaaatttggttagattttcaatttgctcttcaatttgtggccacaaacacacatttgctatgatgatggccccaaatatacctaaactgtcagagaccctattggggattgtctttggatgtgggtgcaattcttgacagcccctgtttagagagcattcttttttattttctaattttcattctgatcaggtgagaatgaattttcttggaccacagcttaaagtgaatatccggccaagttatacataacccttcttttcttgactcatcaattttctttttaaaaagtctcaaactagcattcccaaacaataatttattaatttttcatgcttcaaaataattggtattcttaaaatttagttttttaaaattattttgacaaaaaataataataatatacacttcatgtacattcacacacacacaaaaaaaatccttccgattcttttgagttttgatggtacggtcgccaatttgacccggctcggcccattcaagacattcctaatgcgaaacatacttttagttttaggttgggtcaatttaaattaatttaattgtgcgggttagcatttttttatagctaaatctacttttctttttttacagattttgaaccaaaggttctactttatggacttatattttttaaccaaatgttacatggctataatttaatttatatatatataaataaataaataaataaataataaatagagaatatcaagtgaatttttttttttcattgtcagagagattgaatccaaatgaaattttgtaaatataaatatgaaaaagcaacgtttaattcaacaataactttttaaaaatcaaattacactcatataacttatactcacaatcatatcagtcaattatatggatagtttcatttcaaaacctattgttggattaatttatttattttacatatggatcatatctacaaaaataaccatactaattgtatataaaaaaaacatactaattaaaaaatatgtagttcaattttcattgttctaatacttgagttataatttatattatctttagtgttcttttaagtattgtcaaaattaatatataatcaaatggtttttttcgtatttttcaagtatgtatttaattaattttgatgtttataagttatgtattaaataacttaaattaatatgatttaattataatctatataataagaatttcaacccagtgataaattttggtaaatgcaaattatccaataaaaagttgtttaaaaatgtgagaatttccttaaaaaaantagaatttcctcactgctatcaattttatttatttctcatgatatattttcatttttaacttaattaatatactatcatttttatgataaaataatcttagctcgtgtatattttgtttcaaatgtgacaaatattaatagttactgtaatgtaatattttacacttttatggcatcttactaatttattagaaggaacaaagcaggtaacttttatgtgtgagagactgaaaggtcatagtttacgaataaatttttaaaggaatgccaagcaaagactggggaaaatatcccatctatgatggtacccaaccccatagaaaagctaaggccaacatgaatttattaaagaaagatgagaacaaaatatcatgggaggactaggtcaagacccatgctagagaaatttcaatctatactgagggagtccttgcagatcgtagacaaaaaaatagaaacaaaagaaagggacaccatcccaccaaaaagattgatggatagaaaccgtgaagttagcagtgtaatcttgtaaacgggacaaatattttcttctctagaaatgtgaaaagctttgaaaggaattaaaaaatatatatttattgtgaagatcataaaaaaaaacgtaaaaaatattatgaataatataattttatattttttaatattttttttatttttttaactaatgatctaagaatgttggttagcatttatcataaaagaagattattcaacatttcgttcagatttgttttgatacaaaatttaatatttctttcatttcaaaataaatattatcctaagttgttttatattccttcgtctcattataattggtattctagattatttggcataaacacaaaaaatcactaaatagatgaaagaaaatgacaatttttaaaaaaatattcataccatcattaactatttttgtttttgtaatccatataattaatatcataacagataagtcaaaaaagtaattaatgttgcatttaaaaattaatataaaattattttgagacaattttgtctttttagataacattttttatgggaccaagagactaatagatagataaaagtgaataataattttacacattaaactaatcttaatattaatattatattaaaaaattaaagtaacatttattaaaagtattagttggaagaaaacaactgacattatattaaaaaattaaataaaacacatattttagggaaaaagtatataactgaacacaagtccaatacaatttcccgtcaattagttactgttgaaaaacagtgacgctacccgaaaatgcagaagtctcgtctctttggtaaagatccatacatatataatcaggataaggtaccgaccaagcatcataattttgtttgtatgaacctaaatgatcgctaacaaaacctaatcttcctaattctatgaaatgggtgtacagccatgttcattagtcttcgatggccatatatgacatatctgtcttcctttctaatcactaaccagcagcaactgcactcaccattaagaatttaatttggttaattacagccacatcctggttcgttgtaattatcaattattactttatctcatacactgccaaatcattttgtggcgtaatcagatagaaagtaagtctcaacggtgacgtatagcttgttatacatttgtcgagatgcatgcatacacagtgtaagttacaacatttgaagccgaaactcaacaatacatgaaacatgttcgtcatttttaaattatgataatgatgcgatgaaaatgaaaaggcctcgataatctgtcttcggtttgtggttggctgttatttattttttctttttcttgtttaggtaggaaagtgtgctacatccttctagtattggttgtcatgctttcttgttattttatgtactgacgtgggttagcatgctgccttgaaaaataatgtataacgaaaacaaaagcaggtacaaatattgtgatcacttctagaaggctataaccggttacatctaaggctaatttgaggttaccatattttaattgagacctaatcacagtgtcaacaaaacattttctttaaatgaagaaaaaacctatatataaactcattattcggtaaaaaaaatatgaaaaaagacatcattgtataagttaccaagcattcattttgctacagcggaaattttaaaatttatgtcaacaaattaatttaatttttcaatcacaaatatctaacatatattttaatttttggataagccaattaaaatattttgtagtattttagttgttctggtataaattaaatttacaaaattaagaatatttacagtctaaaattgtatctcaaatttaaatttgtactaatcagtttttatatgagtatgtatgtaatttcatagttacatatatgttacataagaaattaagtaaagtaaaaataaaaattaatattttaatttactttgacttgttaacaaattcttttcataacatgaaaaaatggtataatctttttcatttttatttaataaattctattatgatcttttgctcaattttatttatataattagtatttaataatatattgaaagttgaaacaatgatattttattaattttaataaattaaattttttttatatcactaattgttcttatggtatttttagtaaaggctttttctttgaattctataatattttattattttatatgcataatanaaaaattatatctcaaattgaaatttgtactaatcattttttatatgagtatgtatgtaatttcatagttacatatatgttacataagaaattaagtaaagtaaaaataaaaattaatattttaatttactttgacttgttaacaaattcttttcataacatgaaaaaatggtataatctttttcatttttatttaataaattctattatgatcttttgctcaattnnnnnnnnnnnnnnnnnnnnnnnnnnnnnnnnnnnnnnnnnnnnnnnnnnnnnnnnnnnnnnnnnnnnnnnnnnnnnnnnnnnnnnnnnnnnnnnnnnnnnnnnnnnnnnnnnnnnnnnnnnnnnnnnnntttctttgaattctataatattttattattttatatgcataatatatatttatatatatatatatatatatatattattcgtttcattctctaataatgaaaatattaaaatggttattcagggttattttttgttataccgaattgctcctatttcttttttacagattatttgatttctttattattttaaaaatgatactaattaatcacacacatttatctttagagaagtaaagtagtgtgttattatacttaacgtacgtaaacaactaatcgacttaacttagtaagaaatttaaacctaatcgcctcttgacagaagtacttcatcttaattcaattaaagatgaagttaacccttccaaatttatttttaaaaaaaataaaggtaaaccataacttacctgtaaatgtgaagcccaaaaaatcatgttaaaccctttgttcttaaaaaacccagctgttaacacttgcatgataagataattgcggtgaggttaacttcacttaccattcacgtaaagggtgtcccaagaattgccagcactaagcaattcaagttacagcacatcgcattggtttctcaaatttgaactgccaaagctttttgcttatacttgtggaaataattagttgacgcctccgaatcaacatcctagtaagcaaaattcaaatggaaatacttttaactttacccttcattattatccaactttcagattttcttcctttactaagttttgtcgacaccgaaattattctctgttgactatgaatcatgacagttaaaaagagaagcattagtgggtgtaggtatagccataagccaattttgcacatttgacttttgaccatctattgctcatggtaggcctttttttgttatttataattattattattctcattttagtagtattttattagtatcatacaataatagtggtagcaataaaaggaaaatgtttttgagtgaactgacataatataataattaattcttggaagtgaaaataacagagaaggttagatggcttcaaaattactcaaaacactgggccagaagtccagcacgtgtagggctcagtgggatatgtgctcgatatacgaggaatgaaagggacccaaagcagaagctaaaatgcgtttaagcaacataataactctaacattggttccctctccttaatcccatttttggttcgttacgctaaaatctcactaatcccaattacttgttagtatagtttattggtaagtaagagcatattcagaaacgagaatgacgcaaatttacgctacttgttgctgccatcacgttttaattcaaccattattttttctcttaaatactacaatattagttaattatattattcaattaggaactagtagcttattctcacagttttttttattgctttgtctcctttagttgtaatatttgctttgacttgcaaaaataagcattaataagtatagtactggcaaatattaagggatgaaagtgtgacgcagggaactcctcggataacttagttaattaaaactgacgttaaagcttaaaagaaatatgaataatagaaaacgtgaataatcagataaatattagttagaacatgtagaaagaagatagggatggcaacaagaattaggagtaggaagacctcttttttttttttcgaatgaaattggacttctaatagcaggatggcgtgccaccaaccatgcattaaagtataaatttaaagtcataataaataaaaaggaaaactaaccaatatattacaaagtgtatttatagtgccatgccaatagcgggatctttggtaagggttagtcacagactatgcgttatgaaacattttctgcgtattttcgaacttagtttgctcaacgagtacaattaattaataaaaggacccgttattcctgtataatgcttgaaactttagcctttgttttcatcgctaaaactagcatcgcctaatcgaatccgactttgttggtcgtcaattttgttattttctaataactgaaattgtttttaagtacccgtttgccaccttattaaataacttggtaattaaaactcaataataagcctatagtaacatgcatttttttttttgtgaaggaacaacttatttagagcctagaaaccctttggaaagcttacacaagcttgatcccacctaaaatagcttatttagcaataatgtatacacaccttacataaatagtgatacaatgtatatacataaatagtgatgcctaatgactatgtgtgtggtcatgtattttttttacttgtttaattttctattcttttcctttacctactttgaaataggtagtgagcttgagatacacatgtgatatatattccccaccattcacaatacactggactgtgtggggatgagatttgaattgcaatgattgtgttccacccactcgccatcttaaccttatctattttctttcgcaaatttttccagatccgttaaaataaatctatggggaatggtgctattagctcgcttcaattgcaaaattgtacaattgaaaccccaggttaatatgcttctacgtggcttaaaagaattggctcaagtagtcaaatagtactatcgtttttgtccctttaaaacaaaagcgtaaaagttgtgggaacataatgactagggtcgcatttggttaagagccagcaggttccaactttccaagttcactaagagacctttttttttgtgttttgtttttttattttctcttttttttagggcgcttcctccgtttgtctgcgtgtgtttgtagttaaatttggccaagttcacttaccatgcacgtaaagttgaaggaaagcatggaatggtagtttgtcctaggactgggaggcataaagcaacttcttgcttacacggccaaagtcgtgagaattgatcaactcaattcaattggcaagaaattgaagaaaaccacatgttctatagtttatttatccaagctatggattcagattcgccaattgataacatgatatctgtctgattcgccccatcaagttactctaagttgggcacaaaattaataatgaatgggtaaaaaaatctcttaccacttcactgccaataactttttttttttttcagtatagagtaaagtggacgaatcaacaattaatatgatgagattgctagtatttgcttgccgctaaatgccaatatgtagaatctgaggatttaggtaggtggcgtcagtagtatacatcctcgcaacttttcaaaccaagaaaccacggtcacatgcttgttgtacggtgtagtaataaatttgcccttttgaccgcttctcttacctagagtgaacaagaaaattgtaactaacaaatacttcggaatttttttttatcgtttaatcatccatcccataaattcaaaaatatatatatatatatctaaataagaaaatactagtttttttttaacaaaagtaagaaaatactacttaatattatgttataattaatttaaaaaaatgatagataaggataaatatttttcttttctacaacaagtgagagagtacatattaattgcactacgcctccgctttctttctggagaaaatgttagaaaaggggaaaagggtagggccgaagataatttgagaaaaaaataaaggctaaattataccttcgatttattatgttttagtgttattttatttagtacatataatttaagaaatttattttaatcatttatatttttaaaagtttcatattattcaatgttaaaaatcttaagttttttaacactgtcaagacccgatgtttcaaatttatgtcggtgataaattacagtgtgactataaaatgtcatgataatattatttagtggatggaggttacaaatttaagtgttaacaagacactaatatttgttaaaagaaaaaaatttgaaacttttttgaaaaattaaaagatcaaaatataattttttaaaaatataaataatcaaaataaaccattttaaaacataaaggtttaaaataaaaactttcaaaacatacaaaatcgaaatgaaacttaaaacataaaaaactaaataaaatttttaaaatttaatgtattaaaataaaataacactaaatatgatgaaacaaaaataacatttaaccaaaaataaaaaggtaaaaagtatgacctaaataattaatttgactcatcttagtaataattaggtcattcacaactcgatttcagtttaataaaaattttacacttgggtttaacttataatctcaaattgcatgagttactagtcaaaattacttaaatcttggacagttttaaattaaacatttttcgaaaaatcaaaatatgaactagaaattaaacagaatgcagttcaagtttagttcatatccttattcagtagggaaacagggaaagatgagattcttaattaaacttaatacagttcaagtttagttcatatcatcattcagtagggaaactgggaaagatgggattcttaattattgctctctttttcctaaataataatgtgagaagagaaaggtgtgcaacacgaaagactatctgtaggtaggctgcataatatacatacgtacgtgtacgttatacatatatggttataataaattgtcggttgtacattttttatacatatattgtcggtgtgactcgtttttcagctgagagcaaattaatctacaagggctaaagtgcagtagttcctgattaaaaaagttacattacaatgaagagtctttggctgcatgcagcatgggaaccgacaactctgccgtccttcgcgttgacctcaatctgactattgtagctgtatattactattagtaagtatacgttgttcataataataaaataataaccatgattttaaattgtgatcacaattatagttatagttgtgttattgtgagtcgaaaaaaaattatattataaatatacaattaatatgacgacaattacaattatgatgagtcaaaatatatatatatatatatatattaaaattgtaaccttaacgacaaattgtaattgcgaaacgttatttaaaatcataacaataattatattaatattttgatttcattactttacaacttaatatttgaataaaataaataagttggtttattatttaggtggcttaccacaatctgaaccaaccaggtaggctcaaaggaaaggatatatatagttacaagtttgaattgaagttgaagtggttttatagtaaatgatatgatatgacactcgtacataacacatgtgcatgtaacactagttaaacaagcaatatgtagcttagaccatactcaactcaactcaaccgtcgtttttgctttggtttagtttagatggtgtatcacgtgcacatgctctcacacaccagtcaccaaagggatccttacgaacaagtgtagtatttggcaaatgcgttaagcaacatcctctgcatttgtctccaaattcctctcacttatttcagtgatgagatatagatatatatggaggcatgcaccgtgcagtggtttataaatgaagtgatctttgttgcttcacttgttagtttaatccttttttaaataatttattagtaccgaatcgatcaatctctgcatcgtacggattgagtaatgagattgacatatttgtacgtcaacccatgatccccatcacacagactctaaaaatatctcaacctccttccaactcgcaaatcgcaattctcattacccgcattcgtggacgcgatcatagcacaaattaaccttttctctttggtacgttaactttatgtttaactttggccaaacgttgcatgtgcttggggatttatatactaattaaattatgactaatactatttctacataaatttctcacagttatttttaaaataaaataaaataaaataagtaacatttttttaaaatttgaatcacatgtattctttattaaagataattttatttaagttaaataagattatagtggacgataaaaattttctctgattaatatgaaaacaataaaaaatactattcttaaattggcgcacagtgattcaaaacaccaattgagtttgaagttggtgcatgcatggtgtgcgctacttcttccatgactggcaattataggggctaattatttaaaataatacaaattaaatcaataattagcaaaatggtgcaagatggaaaatatttagcaaaatggggctgccattcacgcccaattggggcgtgtttaaacacgcccaattggggcgtgtttggcccaaatggtgacacgtggcagggaaaaatgggggtgcagggttttcgcgatttttttcgtaagttatggaaggtcataacttttgactgggacgtccgattgacgcgaaaccggtggccacgcgctcgaaatcgagaggagaaggcctgggcaagtcccaaaggggacttgcccaaaaatttttcccaaacgaggcctctaagtgcctcaaaattgcgatttaagttttggagtcccgaaaatttttttgttttctgatattttatctactcaatcagtgaactgcaagctattctttgtttatctaattactcctctcaatttcgagcgttctgacatagaatacgtcttcatcggacattgctacgagaaattacgatctagggtatcaaatttagggtttcagatttagggattactgttgacgatttagggtgtagggtggcttattctttaggattnnnnnnnnnntgggtttagggtttagggtttagggtttagggtttagggtttagggtttaggggttacggtttgggggttgatggtttagggttttggggtttagggtttaggggtttagggttttggggttttgggttttggggtttggagttggaatgggtccatgtagctgctgcgtccgcccccttcttagtcaatggggcagcaggttcggcatctactaaaaaagagagaatccacttgagtttagggagcaatcctttaatgcccgcaaactgctctctagaagtagcgaaactactgcagcaaagcacttgttacaattgtgatcagcaagggcattggtcttattactgtcattccaaatctcccttgcccacgcgcctaaaccctcgaactggaacccttactttgcccactgcgcctctaagtgcccaccgtgccaccatggcttactagtctctacgtcgagttcgggaagagatcaatttgaaaagaaaaaaaggagacagagaagggccctgatttccatgattaccagtaatgaatggtgctaaaccctaaaccctaaaccctaaacactaaaccctaaaccctaaaccctaaaccataaaccctaaaccccaaaccctaaaccccaaaaccctaaaccatcaaccccaaaccccaaaccccaaaccccaaacctcaaaaccctaaaccctaaaccctaaaccctaaaccctacaccctaaaccctaaaccccaaaaccctaaacccctatacctaaaccctaaaccctaaatcctaaacactacaccctaaaccctaaagaataagccctacaccctaaatcgtcaacactaaatttgataccctaaatcgtaatttctcgtagcaatgtccgatgaagacgtattctatgtcagaacgctcgaaattgagaggagtaattagataaacaaagaatagcttgcagttcactgattgagtagataaaatatcagaaaacaaaaaaattttcgggactccaaaacttaaatcgcaattttgaggcacttagaggcctcgtttaggaaaaatttttgggcaagtcccctttgggacttgctcaggccttctcctctcgatttcgagcgcgtggccaccggtttcgcgtcaatcggacgtcccagtcaaaagttatgaccttccgtaacttacaaaaaaaatcgcgaaaaccctgcacccccatttttccctgccacgtgtcaccatttgggccaaacacgccccaattgggcgtgtttaaacacgccccaattgggcgtgaatggcagccccattttgctaaatattttccatcttgcaccattttgctaattattgatttaatttgtattattttaaataattagcccaattatagggggcacgtagtcaacctaactgattagaaaagctactgtgggatgaatgggtcattgacatggaaatgcaacacatctttttatattattttttcttttgccccagaaaatatggcccgcttttaggtgtcaaaatccagtgccattgtccgtgatttccctttcgatgcctgatagaggttcattatataaccacatataattcgtgcagatgaacccctatttaatggctattttggtggtggcaatggcaatcgttgtcaaaatttaatcataggtcatattcattcaactaagttaagaaaaaagataagaaagattgagtcaacaaaaattttaaaatctaggagatcgacagttagggataattatgttagtaaatatactagatatatatgatgtatgaattatttatagaagtttttacatatacttgattttttaatcgtttatctctttcaatttaatctttttattttattattattattattattattattattattattattacacttgtatgttagtcacgtttttatttgatttgacatatgattagctaacatgggttgatatgagtagttatgatgaatttcgtgtgaactttcacattcccgtctagaggtattaggaaggagtgtctccaatatttttaacttcagttgaaccatagagtagagtctgcttccattataatttaggatttcatcgatatatagcattggtaagcaaagttttttacacagactagtacaagaattgtttttatttatttatttaagatgtaaaatatgtgaagccctgtgtgacaattttaaaaagaaatgtaaggacatacttctagagtatatataatgctgtacgatccactttcttgaaataaactatgacaaattgtgagtatgcatgaaaaaatggacaatatgatttgattacatcaattttttggggagtgaaaattgtgaaaaaaactattcatttttgtgactcttgatatattccctctaaattcgtatataaataaaaataattttatatcaataaaaaaattagttaatattatttaattttttaattttaaataaaaataaattatttctaaaatatttttattaaaatttattatcatgaataaaaatgagtcatttttaaaatataattaaaactaaataaagtgtgttttaagaataataatattaaatatgaaaaattaattaaatttatttataaatccaatatttatgatcacttttttatttttttatatatgagtgcagggagtaatatatatcacattttagacctttgactatgtataagagaagtgatctaaaccaaaacacaatttctattcattaatgattttttttttaaataaaatggtacagttaaaaacttttggatctggtaccaacacgtatacatggtttagacattaatattgcattatgaaatacaatgaacaacgcatatttgatatttgcatcatctttattaaatgaatgctaataccatctacacaagcatctagaaatcataagtataccaactctccctattaattgcgatacatgaagcaagagacagaataattggtctcaagcaagaaggcaaaattatcaaccattgacgaaacaaaactctgctttcccccaagtgtaatttcctagagcaggtagatttcaaaaattgaatttattgggtaaagaagaattgaaaatttcaaaaaattattttattttgaaatagagaaaaaagtattattttttaaataatatgctgatcttcatcattcttttataattcattttatatgtttgagatcttttcacaaaaatcagacattaaactaaaaatcattgctaaagatgtatactaaaaatgttttttaagaaattaaagaaaattaatgtacgacaggtatacacaaaaacacacaagaagcaataaatagtgtgtagtagtattgtttgatacgtttttccttcatttggtttcaagaaaaaatgaaggggggaagggtgagggggagcaagcagagggtgggcgttgcgacacttagcatgtactcagtcgtcttcaaaaatcgtcttgcgtggcatgtgagactagtgacagcaccgtaaggatgtgcctgaaaatgcatccgcgtgccatatttcgacaagagccgtgcatcaatgagagggaacaacttacctgtccagaaacctcccaccaaaaaaaggggccccacttaacatctctccctttacaacttcagagattctgtccaaaattaggagaaagtaagaaagttgtgcaattttgcaataacattccccctactcttggacattacttagataagattgcagccttaacctacctttttaatagcttcactcctaataaacaagccatcacttaggcaggcctgtgtttaggaactttaggaccttagccaatttttttaagaaacttaatattacatattatataaattatttttcaaactaatttttttattttttttaccaattaaactcattttaaatgtttttttatgaatagtaagacatttgtcaaaagtattatatgttgagattgaatttattttttaacttattttttattttttgagttttgaaaaccaagttcccgctttttatttgatttttttctattactataaagtataagaataaaagaaagaagtatcacataatataaataaaaatatttttttaaatctgatatggtattaaaaaaatatgaaaaagaaatagagaaacaatgaaaatgttgaataaatgttatttttaattaaatgaattgataagtcatgcatcaatatctctggttcttaatgttgtcaaaaaaaatttatctctaacattaacaattatgttcctaattaatagtataatttcttataataagctacaaattcaattttcaattatatatatgattttggtatttagttttttcactcctaattgttaattaagacaaataactaactattggataatttttcaatcatagaacatctttgtccgttgcaatttgaacaataggaacagattcatataaaaacttacataataacaattaaaataaaattaagaagcctaaggcaatagtcttaattgcctttcactatccacggccttgcgcttagataatttatcagtcaacatattgatttctgttacaaaattctatttgtgacaaaagttattttgttaatacatcaagatcgttatttttgtatttttttttatcttgataaatttgtattgaaatgtgtattatattatttttaangtaataatgtatttggttaaacggtaattagttctaaatcacaaaacgattaaaatctatacacttttttttttcttgaatcaatcaatttacatggtattaaaccgagtatggggtatttgtggaatgagttagaagggttttatgacttttatctttttctttacctagtttgaaaatgtgatagggtcaattttttaaacttgaatttcatcgtatgttttaattaaaatttataaacttaattgagtttataaaaatatctcaaatcttctttcttctaattatattaaatttgtaaattaagatttaatcttaaatatatttttatagaataatcaaacatctctttaaactaattttactgtcaaaatacttttagaatcctcccactgaaaatccannnnnnnnnnnnnnnnnnnnnnnnnnnnnnnnnnnnnnnnnnnnnnnnnatatatatatatatatatatatatatatatatatatatatatatatatatggaataggactaagtaaattcaagttaatgacataatatagtaatgttaatattatatgtagttaaatcctagaattaaagaagtatataattaaaataaaggtatattttataatttattaaaagttgtattattaatgtataactatttttataggaatttttttttgtctcaaatcattaatgtgctgaattatggatgaactaatgaaccgatgaacctatcatgggatgtcgtggagtcttcgattttgcctctagcattttttatattaacttgtgacacaatccaataatggatgacttcatgggctgcagtactgtgatcaattatttcttctagcaaagctttttgccaattcctgaaagtgaaagctggatagatttatcaggaaactgtgtactgttaaatccacatatgatgtagtacaaaccattagtgaagtggtcgacaaatctctgttcaaaagattttgaaaaaaaaaatatatccgttaaaagtttcagcttgtgctcggagaatatttattgataaaagaaaagaggaatatttgatataaactatgatatgattgcaaatgtgctttctgcaacagtaatgaggagaccagtggccaacttttttttggcttgcagtattttgtatgcagtatggtgcttctgtttctcgtggttgaggagaaattcttagttacatttagagtaagaaatttttttttatctatttattgttcgtcatgtcagtattatgaattattattgttttttacattaatgataatttttaatttttttagataaattaataataatttttattttttctaagtagattactgacataataaacaataaatagatcagagtaaaaaaatatcttacttaatgtgcacttaagaatttttcgtgacggattacatagaaattgttcagaggtgatgatgtcctagcctggacgtgtaaaaaatttgttgaaacttatcaaaattaggtcttaaactgttgaacacgaatttagagtaagattcacagtttttcttatttatttattttagattgaaagtgaggggacattccatcagtatgaaatcattttaattaggtattaatattatatggttataaggattaatcgatattttttctttaaaaaaaaaaacttgtgacaatccatttattcgcaatcttttacttacacggttccctgttaagtagcttttttctttattcctcagttcaattgttgtttccagcagcagtgatgttaacagaagaaagcatggggacaattgacatatgtacacgtcacataaaagaaagaaaataggaaatagaggtaacctttcttcgtggcaggaaaaaacagaagagaataacgaggatgaaaaataataaaaagacaagatgcggataagatgcatatcttgtttatcacaaagagtagcagccagcatgtcagacctgaacacgcctctccactccacctttgctttcaaatgcatatttgtttttctagtactctattatttttttaaaagttttaatgtcagatttttatttatttattaaacgtcagatataatatctacactgcactgcatttttattttccccgttattatttttgttcacgtatgtgttagagattctaaagtcagaagcactaaaatccaaattttagaatacatttgaacttagggtgataaaaggagaccatttattacaatgatttcaataaattgaatatatattttattatgtacttacttttaaaatgtgggtaagcatgaatatcataagcacgaataccatactaatttgtgaaatataattagacttaaggtttaaaatctaatattagagactcaattatcttactatgatcgatacactattcttgatcgtcttaattagttaaacagtctacgattactcaaaacttagtctcaaagacctgaatatgtgttatgctcaatctgcctgcctaacttgttaaagcttaaatttctaactctaactaggcatgacaacgagacccaagctcgtgagtacccgtcaaaacccacgacaaaaattcggggacgggggcgggtttggtattgataatacccaccccgcccccgccataattaaattacaaatttacctttatatatataagaataaaatcctgaaaccctaaccctccccctcatttatcattctcgacgacgatgaaccttggccagcaactttctgaattaattccattttggaagctttgttgctgcaatggacctctactctttgttgtgttttattttaattttggaataatatatatttaaatgatattatattttgggagaaattaaatatgtaggtccataatggttttaattaaattgattgattttgtttaataatttttaaattatgatttcatattttgaatgtgggtttgttattaatttttttgttagctagtcaatttttttccgttttttttcaaaagaaaagtcacattattttttttttaattaatagtaggggtggggcgggggcggggaagggaaaacccgaccccaacgggaacgaggatgagtttggattttaaaacccaacgggaatgggggcgggtgcggtgtctaactctagcgtaggtattaatattatcaacataaaaaatttaagcaagtattattataagtgcttaaacatgtatgtgtggatcgatatacatgtaggacagcacgccatgtgttccaaattggaaagatctcatctaatgggattcggggggtacgagcaatattgcaaatagtacgatatgggattgggttggcgtagatagatcgtagtaggctgataggttgtgcgataaatatttatagatagatagatagagtagtaggagttgctataatctcatacccacacgtccggtcccattcgctcactagccgatgagattggtgatctctgttatggactcaaagattgtcctcatctcctaatacatcatttctaactttttaagaaaattatatgagatatcaagtattttatttgattgacatgttgttgtgaaaattttaaattagaaaattatgaaaatatcataagcgattctcaattttattctgatgtatgtcatccttggacctaaagtcatgagaattcctacattaggagttgtgtgttttaatgtcatcaaatgttgtccatgataaggtgattatatagttggttattggatataaaacaaatagtgaattgggatgtgagtggtctatatgagatttgtccatccttcatacacgactaatatttgtgcgttctctttatactgtaagagaattatgcatgacatgccaaatgtgtagtcaatgagatattgatctcgtttatttgatgtttgcttttagtattaagaaatagataaactggactatacaatattacatgatctatgcctcgtattgaattatgatatttaaaataaaaaaaaaagactaatttgaggtgcttaaatgggtcttgtacacatttgactcatttatactctttccaaatcaagtacttgataaacacctattctctccggtccaatacctttggttgggttcttatcctgacatttaattaataatttatttgtttagttataacaatcttatttataaaataatttaaaaatataattggaaatatgaaaaaaaatatcgcagcatagaatatttttattgataatacaaaatagacattaaattttataaaaatatttttagataatacaaaaatcaaattaattttttttaaattataaaaaaaattgcgtccaaaaaattgaaactaagaaaataataattaactttttgcttgaaatttaaccaataattgagtttgaattgatttggatgtattagatgaaaataaataagggagtaagttgatgatttgagatatgtgagtaggggtgaaaataggttaggccaggtcagactttgataggtctgagtctgactcgcatcattatcattaagcttaagcctgacttgttacatgttaaaaataagttattaaagtctgtatacaaagtctgattaaataaaaataaataattaaaaataaaaaataacataatatatatgtttttcttataagttatcaaatatgatcctataagttatagatatgtttttcttaatcatttatgagattttcaaggtgattttttaaagtgattggtcatctaccttcataataagaaaaaatattttttaaaaaataaatatattatttttaagtttatatatatatattaaataggccagtctgatagacctaacagactttttttaaagtttgagcttgacctttttatttaaacagacttctccaaaagtcttagtctgacctttataataaacaagttagatcaagtcaagctttaactagaccagaccaaaagtccctgagagacaacctgatccattttcacccttatacatgagtaaaaaaaatggatgagattgaactttgaatagaagagtaacttttagaagaatgaatgtgtaaaaaaaatatgtcacttatatttattacttatatttatatacatggtattggtgatatttaatatattagcggtaaaaaaataaatgaaaaataacgttcaaattcaaacggtaaaatacgtgctcctaaattgcaaaaatccaatttgccaacggttacacaggcagacaatttacttttcattttttaattaaaaacgtcacacatgccccactatgacataagtaggaatcggttctggtttgaaaaacacatataggatatgattctcatgcaatagaaatccaatttaagtaccgattattttctatcatatattgtgttggatatactttgcattgcagacggtcttacatacttacacaacaacatatgtcattaaaatgttaaatcacaaacgtttcataattgacataagttataataacttgtctatattaatcaaatggtatatgtctatttttattaaatgatatatgattcaaatctcaattttgcatacaaaataaattatattaaaaaattatcttgtgacaatgaatattatatattaatatcatgatgataaaaaaatatcacaaacatgttttttatttggataacagtgatatattacttgatattgctcattatttagtctttttactaaaaatatttttaaaaaatatatctattaacaaattatatagataatttttgtaataatatgtattaatcaaacaaaaaattaactcgaatgatttaattatgttaaaatttcaattactgattaaaataaaacctttcaaaattaatatagttgaatatatttcactatttattttgcacaaattttttgttaataattttaattttcatgaatattgaatgcaaaaagttaaatcaaccaaatcatcaattaaatcaaataattttattgattgactaaaattaattaattaattatcacaaaatatgttaaaattatcacatatgttgaaattttattaaacataagatttaatttgtattaacaatttagattttatataaattttaagcttttattcagtgttaacgtataattatataatttatgtattatgttaataattcgagttaagattgacgtattatgttttgagttgactctagtcttatttggaatattataaggttttannnnnnnnnnttaatctatttgttatttcattttaattagtaataaaagttagtctatttaatacttatttaggcattattcatctggactagtattttaaagagaagtggtaacaacactttttttttaaactctttttgttattgacttttttttgtataatcactgtgaatcccacatttaaaatacgaaaaagaaaattaataaatgacaactgaatctattaaaattagtgacttttaacaaatttcaatcaattatgataaggattagaaagaatgccgttactatttccctttattaaataaattcagttttaagaaaacatatcatcagtgctaaactaaaccaaaggaattattgataatatttcataagcaacttatgtgtaataggtaattaacattgatggcaattaatgttttgctacttttagttctaacgtttaccatattaactaatagaagatatgtatttttattgtgataaattaaataataaaagttaactattnnnnnnnnnnttatacttacatttagaatacttattatttattataaatcaaatatataactcatgagtaggaatcaaattatacgatataatttaacaattattataacatttgtataacttaatataaaatataaaatgtgaattgtatataaatcattgaattatatttatatatattattaatttcatttgtgtcaaattttttaaaaattgaacaataaaacaaaaataattaaatgatcaatattttattatattttaaaatattaatattacgttgattttaatttatataaatggagtaataaataattttgtattaatatgaaaatttttatataatttatataaacagaatttttaatccaactatgatttttaagataaagttaattttgttataaattttaattatataagataaggtcaattatttatcttatgccaacgtacatattagtataaaaaagttaaatacgggtattaaaaaaaaacaggtaaaagcaaaactgctttttcggacaatatttcgtaaaatagtagttattgccatttactttgctaccacccatctcttacacgcaagtacaaaatttgagcaataaagattttaaaaaaattgggatgggaatgggaccataaaaacaaaaaataaaggggtaaacaagtagaagagaggagtgagtgtaactgaaccagttgctaaatcgtagttttgacctcgaaaggagtttggtcttaaacgagtgcccaggattcggtacctgaaattgcccactccaatgccactgactgctgaaacacgttccgaagggacacgcaccaaacgacacatgtgtctctcacgcgcacgcgagaatcgcgtatgttgtttcaaacctgtggtgaagttgaattttcaaataactcaagttagtcgtttcactcccaacaaatttaaccgcttttaaaacaaactcgacaatttttactgtctctctcataaaaataagtaaaaacacaaaccgaggaagagtataaaaagagaaagagagaggaaggaggaagaactgttcaaaatcaaaatgcagactaaggagaagcatttggcagtacaaaataagagccaattttcaattttaacattcacagcatcgatcaagtaagacgcgacgaggatgcggatctgggtcaacaacgtttgaccagcataaacgatgacattagggtttaattaagtacttgtgggtcccaccttaatatttctcgtgtcccgttattattattatttttttttttacaaattctcaaagaagtatttaaaagccttcggccttgtcgttgatgatgttgtggtccgggtttggagattcattacattacattacccctcttatatataacttgttacctaggttttccttcattctttatctttcaaaagagagacacaacaaaaggaagaaagagtgattaagtagggacatgagaacaaggagaggagcgtgttaccctggagtagtctcaaggatttgttccgatgtgagggtttcgaagaaaataaacaaggatctgcacatccatatgcatatgcatgtccccgccggagactccattatttgtagccggaaaaggcagaagaaaacgccggaaaaaaccgccggcggtgattacgattttttcgagtctttgccggacgacctcgtaatctccatcttctgcaaacttagttccaccgccactaaaccttccgatttcgtcaatgttttaatcacgtgcgtctttactcaaccctcgttctcctccttcccacatttctttgaacgggtttttgattctgttttttttttttttttgaaaaacaacaggtgcaaaagattaaacagattagcacttcattcgcttgtgttatccaaagcctcgcccagaactttcactattaaagcaaacgtttggtgcgaatcggcacacaaattcctcaaacactgtgccgatgccggaaacgttgaagcttgctatactttaggcatggttagtacaaataataatactaattaattaaaaaaaaactgcgaagtgtgaagaaattgttgtttgttattgttattgatgaatgatgaatctaaatttgttgatttggtttctgtttgtgcagattcggttctactgtttgcaaaaccgagggagcggcgcgtcgtttatggcgaaggcggcgattaactctcacgcgcgggctctgtactcgctgggcgtgattcagttcaacggaagcggcggcacgaagagcgacaaggacctacgtgccggcgtggcgctgtgcgccagagcggcgtttctcggccacgtcgacgcgctgcgcgagctcggccactgcctgcaggacggttacggcgtgcggcagaacatcgccgagggacggcggttccttgtgcaggccaacgcgcgcgagctcgccgccgtgctgtccaccggcgccgccgcgcgcacctggctgagttggaatcttcagccgcagcagctccggcaggggtccgggtgtccgcttctcagcgatttcggatgcaacgtgccggcgccggaggtgcatcccgcgagccttttcatggcggagtggttcgccgctcggggcggttcgccggggccggggctgagactctgttctcaagcggggtgcgggaggcccgagacgaggaagcacgagtttcgaaggtgttctgtgtgtggcgacgtgaattattgctcacgcgcgtgccaagcacttgattggaagttccggcacaaggcggagtgcgcccccgtggagcggtggctcgacgaggacggggaagatgtcggtaacgacgagggtgacggagaggtggaggttatggtagatagttagacaatttttaccacggtaacggtaacggaagtcgctttggacggaaaaatgaatctatttttggcgaagtgaaagaaaaagaagaattacctgtgatgatttattcgccgtctcaaaaaggtagaagagagtatatggcttcttttcttttttccttgtatagttcgaaaattctcccgaaaaatacgagaggagattctttttctttttcttttttttttgcaatttcggagtttaaagttaatttagaaattcaatgctaagaggttactagttactactataatttttgttattaatttaatcgatttgaatttaattaatagttttaagttttattgctatattaaaacttattttgcacatttatctacagtcacttgtttgtatttgagatattagtggatacgtcaaaattaaatgtgatttggttgaagattgagatttggtgagctgtgatttgtctctattgatttaatgcggcgccatcgcataaggttgaaaaaggaatagtgaaaataaatctaatcagttcacagacatcaaatttagcattcatacaattttacctcccctcacatgcatgagatgattgcagagggttgattctaggtgatccaacaacttgttagtagcgtaaagaaaattataaaaaaaaaaaggtgttaatgacaaaagattcaaacgaacctatcattgcttgatggcactaattatttgaaagatactgttaaatttgtttctattttattctctgagctagacaaaccaaattgctcagaaaaggtttaagtgaggttaataataataattagttctgtggtctttgagtacaagactaataatcttcactccgacatttgcctgacttgtttacaacatgtttctaataatcgtgatccatttacagtatacttttttaataaggttttttcaaatcccttttacttcaaagttcaattgctttagtggctaaaattcagaaaactctctcgaactgtatagctcatgtataacgaatatagtccatagtttaacttagcaatataactttggaaacacttctaaattatgtttaatgaagtatattcacgtttcaatgtgaaaattctaaagcaactctggtgttgcttttacaaacacggcgggatcgtaccatttgagtctttttttcatgctttttccggacattttcttttccaagtgaagtcccctagtatatgaaagagtgaagaagtgttttcattattgtggaataagaagccttcgtaccttgagatctcaattccagggtttaatagtacatcctaataggggatgaccatacttgttcaatttatctctcatatttgttcacctcggtgaacatttcatgatattgcccaagctgccttcgatatgagtatgaggaattcctaaaaaacaattgtttgaagcctattgatattttggcctcttctaagttgtgtttgatttaggaaaggaggagataaataagagaaattttatactttttatgtgaaattcattcttttatatttattttaattcatttttttttctattttcattatctataccaaatacatccttaacgctagcttaatttatgtctagtcttacaataattttaagatatgttttttttacattaattgaaatgatttattagaaatattataattttcttagatgtttataaaattagttactttttttttactgaagtgtaaaattagttacttgactattataaatttaatctatttgttatttcattttaattagtaataaaagttagtctatttaatacttatttaggcattattcatctggactagtattttaaagagaagtggtaacaacactttttttttaaactctttttgttattgacttttttttgtataatcactgtgaatcccacatttaaaatacgaaaaagaaaattaataaatgacaactgaatctattaaaattagtgacttttaacaaatttcaatcaattatgataaggattagaaagaatgccgttactatttccctttattaaataaattcagttttaagaaaacatatcatcagtgctaaactaaaccaaaggaattattgataatatttcataagcaacttatgtgtaataggtaattaacattgatggcaattaatgttttgctacttttagttctaacgtttaccatattaactaatagaagatatgtatttttattgtgataaattaaataataaaagttaactattaaaataaataaagtagttactttttaaaaaatatataataaatatcataataagatattgaacttactttaggcggaatttttttttctaactatagaaacatcaaattcataaacgatactatgaagttgtaggagagagttattgaatatcgcctaaggagggagatcaatttttccaaaaatcaatttggatttatgccagaaagatgtaccataaaaactattttcttgatacgacaattaaaggaaagatataaggaagaaaaaaaagacttacatatagtatcaatagattttgaaaaaacatatgatagggtctcaagagaagtcttatggtggattcttgagaagaaaaatgtagcattaaagtattttaatacaatcaagaatatatatgatgagactaccatatgtgtaaaaatttgtaatggaatatcaaggtattttcctatgacagtaggtgtttaccaatgttcagctcttagtccttatctctttgccttagtgattgatgaactaacgaaatatattcaagatgaagtgttgtggtgtatgctttttgcagatgatatcatgcttattgataaaaccaaagatgatgttaatagaaaattaaaattgtggagaaacactttggagcctaaatgattcatgataagcaagagtaagagagaatatatgaagtgtgagttttcgcaggtaagagatagtgatcaagacacaatgtatttacttggtcaagaggtacccaagaaatatgtttttagatacttgggatcaattttacaaaaaggtgatgagattgatgacgatgtaaatcatataattagagtagggtggataaaatggtgaagtgcatcgggatatttgcgtgaccgcgacatttcccttaagttaaaaggaaaattctatagaacagctataataccgatagttatatggagtggaatgttgaccaacacataagcaacatgaacataaaataggggtagtagaaatgaagatgttaaggtggatgtgtggttatatgaagataaataagataaaaaattgagatattcgacgaaaggtatcaatgatactgatatgtgaaaagatgagagagcatagattgaggtagtttgagaatgttatgagacgaccactagatgctcccgtaagaataaaagtgtgttaccaagagctcgatacaaagagagatacaggtcgatcgaaatttacctaggaaaaggtagttaaataagacataatggagtgagatatagattgacgaacgatatgtcttaggatggagtggagaaaagttataagcttgatagaggattaactcattagtagttttatgttctagttgttcccttgtttttgttttcttcttcttcatttctttcttattttattttaacttatttttcatttcttttgtcttatttttacttttttctttccctctccttttctctttctttgtcttattttcgatatatcattaaattcatttaccacccgtctcaattaacttgggttaaaggtgcagttgatattgatattaattagttatattttttaatttttctaaataaaagtattagtaattaataataattttggagagtttttttcttctataaattgagtctcaagtaaaggttttactttccttatgtttaggcacaccatggctccacatatgtcgataaaatctgtagagaatcattggtacgatttgatgaatttatgaagttttataagtaggtttatacgcattaagttttatgtacacaattggaaaggtcctttatttctatttctttctatttgacccaatttattatttattacaactcacaaagcaggatattcaattttaaaagattcaatacctaacaaagttattcattaaaaatacgtaaatgacatnnnnnnnnnnnnnnnnnnnnnnnnnnnnnnnnnnnnnnnnnnnnnnnnnnnnnnnnnnncatcttctttttttttttttcatctgcaattataaatgtattaattaacataagaagtgcttaaaaataattacatctccaagattctcacaacactacataatctgacagtgcaaaatcaaaatcagtcaaacaacagaaattattacatcaaagaggagttgaatcttaatatatactcaccaaaacttatataaagaaagatacatcacttcaactctagaatcaaaccagaattcatactcaatcaccctacaaacttaaaatttgatagagaagcaattggatcagcttgccaaagttaacaagtgatacaaaaatctctttgaaaagctttcaaccatgaccatacaaaaaacatgattttgtgtcaaactttctcattgtcaaattcttttccttcaaacaccatttcatttgattgactccatagaattcagaggataacacaccatcccatcacccaccactcatttgcttttctcccaaccaaacaatgcgcatgttgcaaaaaaatgatccaataggcagtgcaaaatttaaacccataatactagactaacgtttccaaatattgtgtgaaataggacatgtaaaaaacaaatagaataaatcctttacctcctctttatagaatgcgtacaataatttttcatctaactttaattatcgctgtcttttttttttttggtgttttggtcaagaggggatcagaaaagatgaaaaagaaaagtaggagacacatttgagaattccaagttgcagtgaattggtgtgggatatgcgcatatttgcatatcatagagtagaatgattttgaaataagtaagctggctggaattttagtcctatataagaacctcaaaatatatttaaaaagggggaaaaatattcgattttgcacagattattagttttaaatggggaaacaaattaatttattgggtttgggaagatggtgagggattgataagagtgcacttattctttctgcaatgttcgttatttattaatttttggtccaggttctttatttatttcagttgcactgaaccccatacaagtgaacgggtggtccaggcccaatacagtaactagtcccatttccaaatatctattcaaattacggagaagaatatcacaaaagggatcatagagaagacgaaaaaagggtaatagtttggcatctttttcaaacaagaaatcttgagttttttcattaattttttcaataaataatctatcactatacttagagaatatggaaataaaaatacaaagaactttgagagacatgcttcttttatttccaggaaacatatttggcatttccttatggggaacattagtactaaaataagaattagggtcacattctaaagagatgggaggcttggcaaaacaaaaggaaaaaaataataatagttagaatggatgatcatatatgttgggtacaatagaattcgtgcattagaaaacaaatttgcttaatgggccagctacggagacaagcttacttgttacatgctaactaccactattttgtcgaaaatattaagaaccttccacgacaggtgggattcttatgcctttgaattgagaatgaattcccctgtttgagcatctaactgttaattttttttcctttcttgctttaataatctctgtttgcttcttgctttggtatctttgcatagcatatgcagttattgccaggtcggttgtcaccatcttatgctttctgtctaatcatttttcatgtcagaattagagggagacaattttaaatcatcttaattaaaggcaatttaactacatagcatcgatttattttttaaactcctgaatgcatattttagattaatgtttagtaaggtattatggactaactaatgttttattgatttaagtagtaagaaatttatttatttataggtaaggagaataatctaatttatttaatcagggaaatattgtagttttttatttaacacctaattagtttccctctattcgagttaaatggagttagttcattttaaaaaaatgatacttttaattatgattttatgccaaagttgatcaaatcttaaattttgattaaaaaaattaattgtcgaataacttgtttcaataacctttgatatttttttttttgttgaaattaatacaaaaactgaataattgaagacttataatatttatcaataatttgacaacttaacttccaagcttaagttatcaagtaataaaattcattaattacttttaatgaaaaattacatatgttaggacgatttctttaatttactttcattttattggtagggtatactttgcaaaatgggaataaatgaaaggagaaaaaacataaactaaaaggtctcctctttgtgattggggtcaaagaaaatgagataagaaagaggggaaatgaatgatgggatcatgcctcaccagacacgaaaaaaaataagaagacaaaaccacgtaaagagagaattatttattttatcctgagaagtaatgaattataaatatttgtatatctaatgcatggataaaaatgtctcggtgataaaatatttttttcgttcacacttttacctaattatatagagacaattcaactttttccctctttattttcttttgatttaaataattttaaattttacttttatttatttatttatttatattctcttttattgaatttcttttatgtttcttctcacgtccaaaatccaaataaagcattcaagaagaaatagctctcctcaccacattacccttatgtagtactacctacattaaaaaaattacaataacattatttatgcctgtattaaccttaaggtagtagtatttctttacctgtaaagaccttataaaacaaacgcaactatttaataaatatttattactattattaaagtgagtggacccatcctaaacnaaacgcaactatttaataagtatttattactattattaaagtgagttgatccatcctaaactattccaattccaattcccacctagcctagccactacacctaccaaaaaagaagacttgttggctattttaaaaatgaattaataaaataaaattttctgtttttataatgagttggtaggccaatcaatttaatattataaataaaaaagaaattaaatgattttaaaaataaataaaataaaataaaaatgaaaagataaataaataagaattgagaaatatgatgaaaattgtgttagaatacgagcttctagttaacgaatgaaaattaaagaaacagaaaaaattgacaggacaactgttccacctttgttctcaacttatcattactcatgaattatatgagtctataaattaatacgaggaacccaacaaataaataaaaatgagtaaatgggttagtatggcacatcaaacccactttattaagattagttttattaacattctttttgtacgagtgtgatgtaaaagataataaaaaataaaaatatatagataatataaaattgaataaatatagatagatgccaagtgttaaaaagtttgtgttagaatacttgcattcctcttatacttcaattttacccattgtttatagttgtatgaatttattgcacttttatgtgttatatatatatatatatatatatatatagatattaaattgcaaagttatattgaaaaaattctgttggagtgagtaatatttatcagggggtgaaaaataaggtgagatttaacttaaggataatagagaccgaatcttattcaccaaaaaaataatagaaaccgaatcctattattttgagtaaatgtccgttaactataatggcttgattattaaattaagcccagaccaatataagtattaaatggctgagctgcatgatgggaactaatgggcttaagaaaattgagcccagacgttattgtaatattggcaaaaaaaaataaaaacttgatccagaagtaggagtgggtttagccacgttgaaaacgcaggcatggaaagcacagtctattttcattgggtgctgatcggaacaaacaggtaatgcagcaaagcactttctcacactgaattttcgcgtttcaacaatttcaattgcactttcatcatagacttcttcgtaatattttctcggaatgttccagattcgtggcttttaccgttgttttgttgtcatgattatgtttttctttctcaatttcgtagtttaggatttcgacatgattaagtgctttattttttttttttaatgattggaagggaatagaagagcggagaagatgggtttcataatggaattcgctgagaacttggtattgaagttgatggaagatccgaaggaaagggatcggaggttcagggagcacgtttatagagtgaaggacaggtgcgagaagacgaaggagatgtggagctaccctatgcgaccctatgggttttggacattcgaacgccacaattctcagcttgcttgggatgcacagattagccaagtggccgggaggagggacccttatgatgatctcctccaacatttctttaccccacctaagtgaggtattgttgttgaaaactgtaatttccaagtatgcagctctcaaatgtcaatgcaaaactggattgtttttggttgattatatttggttttgtctctttgatgaatgacggtcaattactgtgtagaggttattttagtactttgaggctgatgttttgatttgtctgcatgctcttatgattatattgtgtttatggagtgcaactagagatactgtgttttttaaatcctttgggttgggattctggagttgtttaggatgagagttgatggtgaaactctgcagagtctgcacctgtcaggctgtcactgctatggtgtaagctgttatttactatattagaagcgtggtttttagtagctaaaacaaaataagtctgagctttattggggtgagaagggaaaaatggtgaaagttgggaaggcagggaatgaagtgagaaatagtggagtggatgggttttaccaattcttaggctgtgaacatggaaaaagaagtatctacaggcttgctaaaggtagagaaagaaagagtgaaacgcatcaagagttagaagggtaaactaaagtcttgctaactaaacaagttatcaaggaaagatggaagagtcactttcgagtttcaacaagacatcttcaagtgttcctattacatatgctttctcaggtacccttacaatcacctcagtcaagaataatttggcttggtcagccttagttgaactctggtttataggtctggatctctttgacctcatttaaaagtcagcatctgatatttgctcaaaaagtcaaagtcagtgggacatttttgatcaccagctttgtgctctgttatggtgatctatggagcctactattttgggcaatttcagaatcttaaacatgtttttaaccttcagaaacaagtcaaagagctggtgccatgatgcatgcttttgctgatgatatagtactagttggagagttgagagaagaaacaaacgggaaagttgagatgtggagcatttttgagaacacagactttgtataagtagaagttaacatagtatctgaaatgtatgatcagcaaaaagtgcaccagtttgagcttagagctaaaatgggaggccataccacacaagtcgcatgattttaagtgtctaggatccatggtacaacgtgacgggaaaatagagggagatataaaccatagaattcaaaccatttgaatttaaaggagtgcttcaagcaaaacacagtaatgtaaatagaacagtaaatgagagatgagtattatttgtagataacagaaaatacagtagatgataatcctactgcccagagccaagctctttcagagaggttacaattctctctccataacagaattctaaaattcccgatacccctctctctctgacaccttccctaaataccctcagattccatgtcacacttttggcaattctgttactctcttgccagatctttccttttctcacctttgtttttcctagcatataccctggatatcttgggcctctcccttacttctaagcccacactcccattcctatcattattagtgatagaaaagtactactgaagcttcaagggaaaattttactccacaacattaattatagtagttgttatgttgtttaggattgaatgttggagagcagacacacaagatatgcaaggaaataaacttgatgttgcagagcagacatgcaagattataattaggaatgtttgcatttgagtgggggttgaagtagcatgagcatcgattgtggaaaagatggtaattcctgccttaggtagttggggcatgtgtagagaagacttgtaaatacccaatacggagagttgattagatgaagggtagtgcaataattgaggcagagggagataaaaaaccagaaaataaattagatataaatggtttgtcattaggtatgatttacaatagagcattattgttgttcctttaattgctttctttatatgtatatttttctattatagtcttttggaagtttgacgaggtaggtttctagttataattgcagtacctgccgctgtcttctgtactcatatgtggtattctcttttctatgcagtgttgctgaacttgccacaagcattataggtgaaaaggatgaatttgtcgtaatttccccttctaatatcctgtcttgtcgcatgttgcagagattacaactggattgtactgttatttcaaaaataaaggttccatataactatgctgttacagaagaatttttcctctccagaatttacattcttgcacaactgcacttcttggcaattatctgctttatcaatgtttcatgtcattatttagtatttacattgtttgtggatgattcatttctgtcgtcttgtagcctgtagaatgccatatttagaaccttttatgtgttgaatagttcattgttagtttttcatagaatgaggataggttggcagccttaaggtttgctacggaagtaaatagtctatcattgtggtggcaatgttacactgtgtatgtttaaggggaatcccactttccaaagcaggttgaacagggaatccttctcactgtggattcacgttcaatgtgctccaacgtgaaaacaaacgcagctttagtgttggatctttccattaatgtagtgcattgaattttgacacccatcctgtaaatttttattttaaccacaagtctatatgttgaacttctatttcctccaacttccgatcctttcgttgtttcaccaagttgaccttgaaagagatccctgtccaccaaaagaggccggttcactgtggcataattgttatacatgcagaaaacaataaagaaacaacttcaaaacctgcaccattcgaaagccttgtgtctttagatttttaacaaaacaagtgcgaaaatccaataagtacgacaagagttatccataaaataatacgttctgcaaaaaaggaaattatgcagttaatattgtattttcaaacgtataattgttttaattgaaaaataaatctacctcaactatatatcatttcaataaaattagtgatgctcaaatccatcgcataaaacaatggttgttaccaggacaaaatcaacaattaaatttagtttaacagtaggaaaattcaacaaatttcaaaatcacgccaaaagctggacgatatgagcatggcaaaagtcatcatgcagatttagaatgagattttagagaattccttctcaatcattcaaaactattctttgaccaaaaatcaaatcaatacttatttgtttcgatgaccttccctcttccttttcttttttgtagaaagagccaagtctaaagtcaaggaactcttcggtttagctagcagtgctcattacgtcttgaagggcaatcatcgattccaacgagagcataggatgctcctcatgcatttgtgaatgcaaccctgtttcaactctttgaactttgtaatcaacttgtgatgaggaattggcagcctgacctaccctttagtagtaaattagttctgaagcttcaatgtttattccttatattagttataatccctatatttattctgtttaagattttatctctccaccgtacgggacatcaatccataacatgtaagaataatttgaaattttaaagattacgaacgaatttttgatataactacaatcaaaattaaattaaactataagaataaaagtatattctaaccaaataacaataattcttttatgagcctagtattatatttttagtaatactgttcttagttataaaataaatcatttaaaaaccaaaaatatattaaaaatcataataattcgtttttaaaattactattatgctagatataatttttaaaataattattataaatcaacaaaacctgaaaggattagtcaagtgaaataatacaaaatctcgtatttagcacgtagaggcttgtgtccttgggttggagaggcatccctcctaaatttttcaagtgctataaaaaaaatttttttttttggtagatggagaaaaaacaaacaacaaaaacaaaagattacactccagaaacaggctgattcacataatcagctaataacagtccctgagttacacacacaaaaaaaatcttctgctttatcaattagtatttaaatcatattcttattttcttatttattattaagtgtaagtgatttgattgtggcgtccaaggaagaaatgctcttgaaatgtcgtggaatgttaggtgggcaatcccagttccaatagtgagttagtgaccaccctcaatccgcccaagacgacaataaagataatttttatgcaagaaaaggacgaaacaacttcaacttggtgacgtccatttaacgcaaccattgacacaatcccataatgttctacgaacttggttaacttataccatccacacactccgaacccatttcttacacttccatgaacacccacattgcccacaaacttaaacaaatactagccagaagcagattttatgaagaaaatagctaccctattagtagtgctctaagaactctctgccacggaacctgcttcatcttcattcacattgccttctccctgtttaaacgcctttgctatctcatcaattggaatcagaggcaaatagccaaacacggcaaaacccttttcactcgttcccttgaccacattgttgtatttttctgaccagtgtgcagctgtgggaactgccatctctgctactgcatggaatggtggatattggttgagaccagtccacaatttcaccgaaccaaagagcacaatttgcttggactcagtggctacataatttgctgctgctcgtgcccctccagattgagcctcactcactactttctcagctttgtgtgtcacttcctgaaccaaacaagtgacttgggttgcaacctgcttaaccaaagaaggtgcatgctcatcgaatttgtgagcagcttcatccacctgccacaatcatatacccaaaaattaattgcttagcaaatagtagcaatttcccaatccgttcaaacatcaacaagggaatttcatttcaggcatgtcgatgcaagggcatacaaaatttacataaattcattctttttaattttattttgttttaagtactcatggaagacgataggaatcaaacaagacaatttaagggagagaactatacataaaaaaaagtcaaactgtgtgatagtatcaagttctggggtaaacaaaaaaaatcaactgtggatgcatgtacagataacaggttcctcagaaagggtgttattgttatttgccacggttttcaccaattcaactacgtgggggaacgaaacaaatagatcttgatctgaataaaaagataaaaaatcgtcagaaagaaaattcatccttaataattagaaacagaggacaaacaaattgcaagctttaactgatttggttgaaggggtacagcaacaaaagaagaaaaaaacaacaaatcacacaaacaaaactaataaatatagattttcatgaaagaaagagagagaaaccttgttgtcgacaaaaaggaggaggtggttggggacagccttgaatttgtggtagacgggacccagaacggtggttacagtgtcttccacggttccaacagcagatctcaaaggtcccgagttttgctttgcgaagtcgtagatattcgacacacacacaaaggctttaattgccgcaatctttacaaacccaagatgcttcagttcttcttgatcactcttgttctccatatccctctgcacacacaacattattcaaagattaattctatgagatctctgcaaacaaaacatagaaatcgagaaagaaaagagaagaattgcaaacctccaaggtggtggccattattgttttctccgccttggaacttgcacgttagctgttgttgctgcaaatataagctcagtctctcatttggagtgttcatttatagatacaaatgggaatcacatgcaactatattaacataagtaaatgccaacgagtacggactccattcttttttaatccatgtttaaggttgtttttgtaaaaaccaataaatataataattttttattttaataaaatagtcgtagagttttttatttcatttctttctctttcaactccacaataaataatgtatgtgtgaattaattaaagataaaaaaagtaagattataattgataaaggaataattcaggtgatcttgaactttacaaatgacaaataaatagaaacaactttttttttaaaaatccgacaattaaaaatgatcagaaggagtaacttaaaaaatattgattaaagaatttaaaatataattttttttactgaaagatagaaaattgtaatttttatgattttttacgcttttataaaatttatataataaatatttttttaatttcttaaccaattaatctacaataattttttattacctagaccattaacctaatcaagttacttagtactatatagcaattgttaggggtgttcacaggtacgggtcactcatgaatctgaaccaatctgaacagtttgagttgggtcatttatatatttgggtcaaaaccaaaccgaaccggtcntatagcaattgtagtgtagtattaacctcgaaatattaaaagtgaatatatatttactatcatgtctaaacaattccaaaaaaatatgatacgatagccaggtggaatcaggtctggttacttttgttctttaaatacaatcacaaaacaatgccaaaaaaatatttaatttaggatttattatcttttaaaaatacaacaaaaaacaaaaataaagaattgttttaatttacacttaatttcggtagaataagttcaaattttttttattatcataatattagtgtaaagtatcactaattttattaataattaatatatgctagagaatttaactaattcttctcaatcatattctttttatctataaaatttaaatttaatatctttcttaagaaatttaatttcagtgtaactaatactgtaacaatattagtacgttgaaatttaatcacttaagcattattgctttattgcgggatacaatatccccttttttaagtaaaaatgtaggaaaatgagattgtgcctaagtctaaaacaagaatttaaagttttcactccttttttttctgtctgnnnnnnnnnnaaaatttaaatttaatatctttcttaagatatttaatttcagtgtaactaataccgacgatatacgttcaaatttaattacttaagcattattgccttattgcggggatacaatatcccttttttttaagtaaaggaagatgagattgtgcctaagtctaaaacaagaatttaaagttttcactccttttttttctgtctgaggttgtattacttaacctatctcagctttgatatatcctaagtgtattatgattggacttgaggtgcaccaaaacaaataatgagatgccttaaataattatccaagttaaatatcccttcaccgttggattatgtagtctttaatatttttttgtatgctagcccacatgagatattgtcgaataaggccgatcagaaatgccatgaaaaaaattattagcccataccttaacccaggcgtgttatggttttgtatgattctgatttctgaatatcgccatcgtgattttggataaaattaaatgcgacacttttatttattgatatagttttagtttaataaaaactaaagttttaacgtaaatattataaatttattttaataatacgaaacattaataatatatattattatgttaaccattaattggtagatgacgtttttctatagcgattccattcgttattttagaaatattccctccttgttctcttgtactgtattctatcaacgacgacttccaaacaaaagctctacataatatttgaattctatgatttattcccttctttttttcttctttttatttttcttgtcctatgaatggccttatccttccggtgccgatcatattttgtctgtaccaatatctttcccatataatgaatgctacaaattaataaaatcttgatcctaaattgtcacatgaaaatgtaaatacgtcactggaggcttatttttatcctttttttaaataaaaaaggtatctctttttcttttcgatctatttggaaaaaacaacgtgaatgggccatgtaatttctgttctttcttatactttgaaaatatctttaacatggatctcatactgcatacattactgcacgatcaacttaacattcatttacttgtaattatctagttcttgtaactgtattatatcattctcttagcttccatgcatatgcttgtcctctctacttaggcctttacttaaattgagattttctctttaagcctgagttatagagttaggggagttatataatcttgtttttaattgagtctattactatgtatactcttgtggagagtatggagccaaggacttttctggtttattctattgtaaatccctcttatagtttttcactcactccactacaaatggacactgctcacactcttaacttttgtaataattaagcaagacaggcttagaaattatttacaataatttctgtattgtgaggctcaggtcatcattctatagagtaaccttcttgggatattttatgattggagaaacatttttctggtttggtataaaggtaattttggcaaatacaacaaaatttgaatgctagttgaaatacatacacttttggttactttggttaaacctttctcaatacacattaggtatactgaaaggtctcccacctaatgggaagctaaggctgctccaaaacttgaaatggcagaattaaaactaatataattggagagccatgttacaatagagaaccatatccaaccacttaatgcatgaatttgaaaaacttatatcttcagaaaagcaataggaaactggatttcatcttttctatctttgtccagtgtctttgcctaattcagaaagtgtatttcagcattgtctccaaattgtccattggctgggggttggagggtgaggagagtatggattttgatttggaatagagtggtttagtcaatttgggattgcgggaattcaattattttttccaatgggattggtgatccttttcatattgtggaattaaatttaatccttggcattggtttttggctaaatccaataataggagcatttctcatattgagggtattttgaatagtttctagttctattgcggtagtaatggggtactataggatccttggtgttgagaattgattttcaaccccctttttttttgataatttggaatatccttgatactccttttataaagttactagtactcctctgcttaaaacacccactgatggtttgttgaaccagtagaatagacttatacaatgtttgaaaaagaataatatttgtaatggcaggaagacttagactactaaaggtattttagtaaccttgttagctcaagaacatcaaagaatgcaatagcaatgcagactaattatttaagatagtaaacgaattaatgaattatatagtactgataaataagcggtgtactccttgcaagtaatcaaaattaaagaataaataaacatccatttcacagtttccctgacaggtcaaattaatagcaaatatgcaatttcaggtatagaaatccgaaactacctttaaaagatgaatccgtcaatcaatgtaaacaaaaaatattcatcaaattaaaagtaaatcataactaacatcttatgaaaaaagaaagacagagtttaaccttgattggacagacgacattatgttccttcaaagtatcataaacactttccaagctcaaatgctccatgaaaatgtgtacttcaagatttccaacttaatataataatatagtcaagcaagttgataccttaaataccacaagatattgaaattgcactgaccaatgtcttaatacaaatcaggaaattgcagaacaactcatcctgaggataattgaaatgaaaccccaaactctggaagtaactctgtgattggctctgcagcttggaccaaagttggttggtataattgaaggcaaactgtttctaataccatgttcatgaaaaacaactctttggcaagttggaggcgccatctaaacctcatagattctactaccattggatcaaaaacttggttggtgtgttagtataattagcagttgttaaactaataagtttgttgaattttgatgtttgtcttaattatttgactttatgaacgttagatattaatagcattattgagcaagtaaagcaattgacaattgataaagaacagaagttattgagaaattaggtaatatcttgataattgtataggtgaagtcagacagccaaaattcatctcattgaattcttgcttattgcagtatattgaattttttagctttctagctagttgcattcttcatctttttagattctcttgtttaaatcacatcccctttttcgtttatcatctaaaaactaagaattaggttaaactgatacttaaacaataatccttgtaagatcatatcttagaatcctttataattctaaattacttgttgatgtgtttagttgcccaacaagaaaacttaatagcaagtaaaattagatccgatcaaatccttagtttgttctctacaagatgccaaagtaaattttccaatcatgatgaacaagctcgatatgaccacccgtttgaataggtaaaaagcaaaaaacatacatttaaacataggtttaaatgttgagtaaagctcaacaacaacaattactcacaaatcgacttaatcttattttcaataaattataacattcaattgttttaagttttaacaaatactagtatgtgagaatgtatgatgcaacatgcaataatcaaacaggtactacttgcacaaggacttgaaaattgaaatcactgtacatacgttgatcgtggacatttcaaaggcaacaaaacaaacttaatcacaaattgcattaatgacttcccttgtgaaaagataacgtagaatctttggcaatttcgcatataaaatgatcaattaatggttcatgggcacgcctaagagaatatgttaactttaaggttatgctacgtggggacccaattcaataagacaatagatttgtggagcattaacatgattattggaagtgtgagtatgtaattacttcaacaggaataaaagggctttgccttttatactgttggagactacgcgaaacgaatattgatttggattagaaaagcctaaaactttggggacgtgacttaaatatctttaatcactttaatagtttaaagaacctggcttttatccaagacatcatattctaataatcattttgtcaatagaaaatgaattgcacaccacttaaagaacctcagacttagaaaatgcataccatatgagattcccaatattccactaacttgatattggggagacgacgaatagagaagtagaatagtacgtacttcgaaatctgttaccgtcctttcttcctaattaagttagctttgcacgtaaaaatgatcttattggattttatcatttagaacagtgttacagaaaaatatttaacacatttctttttaaagaaattttactaaaatatttgaatctttcttttataatgaactcatataaaattcacctacccataaagagtatattaaaataatattatgtgaaaatgtatgctgctagtatatatatatatatatatataggtaaatctcacttgaaaaaaattattctgccaccataaatgagacctagctaccaatttacataaggatgtatcagcaacatgtacttaactaaagtaaattaatattcattcaattcaatttattttttaaaatggttaattttcaaaattgtaaatatagcataatctgaaaagattaaatgatttattttttaaaaaacgaaagtgttttccatatctttagggattaatttaagtcatccttttttatgctttaaaaagaagtattatgcttaatatacaatgtgtttaaaaagttccgcgtgaaagataaaatcaaaacttaaagacaatacggatagatagataggagaggttaagaatgagcatgggaaaaaaataaaactttgtttttattatcaatccaattactgataaaattcaacacaagttaataaatagataactttataaatatattgacttttgaccatgccaatatataaaaaaaattattgagagaaaaaaaaatctattttgataatctctacaaagaaattttgattatctattgggagacatctttagtgcacacgtaacaaattgacccaatttaattactgagaaatgatagggagactttctctatactctcttttcaatattcttcatgtgattgagtgaaatttgttaaaaatcattaatattgatgagtctcacttatcatttaatgattctctctttatggattgtttaaaattatactattataataaacatatataagttatttgactgtaatgtgacattttggaattaattaatcggagataagaaattcaaaatgagttatttaaattgaacttgtcttaacctttaggctatatcatcctaaagtactattacatgaaagaatcttatcaacatataaatccgtagttcataatacgtaataaaaaaaaaattaagtgatagaggcctcgaaccatctattctaccatagagaaacggtagacaataactcccccgaacacaaatgatcacaaccggaaatgctctgatatgtgcatcgttttggcctggatttacgcctagagcggtttaatgaccattaattacatcagcctcaatcactgagagaatcaaataactttctgactaattaatccacaacagctcaaaaacaaaataagccaaagtggccagtgcacacttgctcctgtgacgcacaatagacaaattgcctaaaaaacaagcaaccacccgttggaattgcacgaacaaaatgaccatttattaccacaaaaatatgacaccacgcaccatgcaacggagaaatgcaatacataagtaattagaaggtgcacaccattgaggaaaacactcttttctaggatttttttttgtcatttcttgattcttaccgatttagtgttagattctttgtgggtaagtcattagtcatcaccgatattcgctagaaaatgcaggaagaactacatatatagtagacttgctacaaagatttcaacttactgggacaaggaagaacatatatagtagacttgctacaaaaattttaaaatacaattaaagaatttaatacaatgacaataaaaataatattattgttgtctttaattaaatagaacaactttttttaacttaaagtttttttagttaaataatctaaactcacttttttaattaacaatttttttaaaagggaaatttaacgtgggtaaggaaacagaggacaatttattttttaaaataattatataaaaaataaaataaaatattaagacactaaatttatgttaactttttattttaaaaattagcaaattaaatattatatattaaaaatgataatttgccctcccttattctacaaattaacctcagttcataaacatcttaacagacggtgtgatttatccgttccatacatccagtttggaagttacaatcatacagaatataaaataaataaaaggaaaggaaggggagggtaaaaatttaaaagaaaaaatgtagcagaaaaaagaaagaaaagtgcattatgttcgtcaaagtttggttattactataggcatccaaagttcaaaaacatatatatacagggtttcagaaaaatgtataacatatggggttactcaaactccaaaaaaaaaatagataaaagaaaactataaaataggttgttgtaactgatcagtagtagacagaaaaagtaacactatttacatgctaaaggtcgaaatagaaaaaaggtggattaatttttcttatttttttcgaagatacgggaggtttaaagtgtaatgcttttagaagttacgtataaatgtatcataaaaaaaatagacagctaaagatagtgataaccagtaggagttgctttaagttgagaaatgattatgataaaggcttaagctttggttagtgacttagtggtgggacatctccagcaaaaacttgaaactagatctttacggtaaaatgatttcgatggcatcccctatatatgatttgttttatatcaattcatatcatataggtgacaatagctagtgagccataatttttaacattatttaaaattaattagatttgttttataaaattgtgcatgcaggtgggttaacccattggatttgctattcagccagctgcgcgcgtctcatggtatttaacccaaagcgatattgaaatgagacgcaaacatacaagaagaaaaatgcatacattacattacaatagtttacattttacaatttaaagatacataaagccttcttaagccactctcttcttagacccacctcctgtcaactggcactggatatttattttaataatttgataccctttaaaaataaagtgaaataaaacttagagataagctccctaattgtacgataaactcatctctaaatatttcactagatatttgagtaacaaatttaacatcaagcatcagatactcgatcatcctaattgcacactaaacatggttcggttcaagggcttacgattatttttatttatttatctacgaaccactagggatcgcagaggtgtcttcatttccatggaaagcctaaggcattcggaaagatccacggtttgcgcgggaagccatatgaagtggcgaagaaggtgcgcgagccagagatgggccgtggccaagcccaaggcccggccaggacacaccctacgtccagccccgaagggtgcaagcctcaagtccgatcccatgatggagacatcttctttgaggaacctctcgggcttgaaagcccacgggtcttcccagatggacgagtcatgcgaaatggcccacatgttaaccattgctgttgtgccagctggcacgaggactttgtccacatggacatcatggaccgcaaggcgagcccatgatagtagcgggcctggtgggtgcagccggagaacttctttcactatggcctggaggtaagggagattcgcaatatccgagtctagcacgtgactgttttggccgacgcacgtgtcgatttcttcgcgggctttcttttgtaagtcttggtgtaaaaccatccttgccataacccattcaaggagtattgcaactgtgtctgttcctcgaaataccatttcctgctcaaaacaacaagatcatatatatccacatatataagcacatccacccattaggcctacatgaacaataagctaatgaatttatgtcactcccaatctgaatcttataaagaaagaatgagatatgcaaccactgggttacttgttaaaatatgttgacatcatacccctacatcaaaggtttttatttctctaaaatacgtccaatattaaaataagggcttgtagatgtcaaaactaattaaagtctcactgagaaaatatttatagtggcatggcgcgcactagattattattctttatcatgatgattgatgaggtactgatagtgaataatatatataagttaatgttttagaaatttcttgaatatatggtcatttcatcaacaatttaacctaggggactttctctactgtgtagctatgtgtcgtacaattaatgaatttatgcatgttaattaacaagttttaagatgataagtaaaataatatactaatccttatttgcgttttttgagggaaatataacgtatggaaaaagatgcatggttatattttatttatattattatccatgggatgagagagaggtccaccactgagtgtggggttttgagagaagaaaaatgattctaggtagatagagtacttacccacagaatagccaccagatctgaatcagccaatctttcttctttgggcaaggatagcaaagtgctaagaaaatcattcttcccaacaaaaccaccctctctttttcgctcttccacaatttgccccaccacactaccaaccttagccgccaacttgtggcaccttctcttcaccccatgaaaatccaaaaacttgaaaggaaaataatcccccaagttaaacatcgcaatcaactcgtacccttccctaaccatatcccccaactcctcactcttatcgttactgccaaaaacactctccaaaatattacaaagtgacccttcctgaaataccctccgaacctccaccacccccttctcctccatctccctccacgcgctcttcaccatgtcgtcacccacgcgctgtcggagaccctccaagccatgaatcctcctcggagagaacatgtgaaacgccgcgatcctacgtaggtgtcgccagtaggttccggaaggagcgaaaccaatggcacgctcgaacatgagagcgcgtgccgattcttttatcggacgatccgaaaacgatgaacccaacaagatttctctagcggtctcggggtggctgcttataacaacgggagtaggccccagactcagcgccattaacctctttgcgttcagggaagtggctaaagccgcaagtttttggtgagctaaagagcccatgaggggcagagtcccaagtatgggccagcccataggcccagtaagttttttattggtttgataatagtgatagtttctccatgcaaagcctccggggacaagccagtagttaagggaaattgcgaagagggttataaagaggatggttgttccaattccaaggcaaagacaaacagcgagtgttgttgaaggtaggagaaagaagaatgttgccgtgggtttcatgtttggtcaaaagaggaggaagaaaaaaaacggtgttattgttatccagagatggacgtgtgtcatgggatatagagcatgtggggatcaattggaatatataggggtggaaagtggataagttaaaagagcccatggttaaggtgaccatggttaagaaccccaggtgctatcttgttatgacgtgaagctgcactataacatttaactttatgagaatcagacccacatcttccgttcctttttttctctttttaaacatcttgattttaggaaagaaaaaataatattttaatagggaaaaattttcaccaataaatcataaataatcatataaatgaatatgacatcacactttaatctaaaatcttaaggtttaggtttatggattttttcttcacttatatgatgttcaacattcttattcctatacgatgtgagacttcatctcatatttgtactccaacaatctatccctcaagtataagtttcatctacataatagtctctccctcaattggaagtcattttcatccacgagtatttttagggtggccttagagctctcatgctatagatacttgcattgtcgcgccactcacgagatacaccgcatggacctaccgtcgggaagacttttgatgcaagaaatccccatgccaatgattcaccatcgtcatcttactcgttcgagctagtcaccaagtcgaacctgatatcggttgttagcaatatcaccttgaattctaaaggaaatgagagaaatcacacacacaaatacaaacacaagagatttaacaaggtttggcaagtgcgcctatgtcctcgggagcaaagtgatttttttaaaccattaaattcagaatatggtaaagtaactccagggtgggagagctactcctttgatgggtgttgcaatgattctatttgcgatatttctatctattattttggagatttataattcgtccattttactctacggaatttctatgaattagattcacaagaatcgagtaattaatttttctatccattattgtttggtagttcattccattttgatcatggaatttcgtggtttttgtatttttggaatatgagtgtgtgagttgttttaattgatcctattgaaagtacaaaacataaaatggatttgtcatcttgatagagatgacacttcgaggtgaaatcctacatcgtgtaggaatgagagggttaaacaccatataagtgaaggaaaacataagcgttaagattttgggggtaaagtgtagtctcgagttcacttatgtggttgctcataacttattggtgtaaatgtccttggtgtttaccccctctatttcccaacaattggtatgagagtcgatggttcgacttggtgaccggtttgaacgagtaagatggcgacgatgaatccctggcatgaggatcccttgtatcaaaagtcttcctagaggtgagtccaaaaagcgtgtctcgtgggtggagcgaaggtgcaaatatttagagcatgtctcgaggggaaggctaccttgtggatgagactcacacttgagggaagattattagagtataagtgtgaggtgaagtctcacatcgtgtaggaatgagaaggttaaataccatataagtgaaggaaagatccatagatttgaaccttaagattttgagttaagacgtgatgtcatattcaatagataattttactaaatacttatgattcaataaaataactttcaacatctaaccaactttttaactatttttatcaaacataaccataatttcatttaattaagttatattattattatgcacacttacgtaaatatattttactttatcatttaataacatattatcatatatattaagttaattattttgtattagttaacattgtgaaaattattatactgatgatgtacaaaaatcaaaatcttattattatgtgtacgaaggtctcagtaccctagtggttcttactatatgtgtgtgatttagtaagtttgaccagtaactcactaattaaatcaacgtcttagtaacctctaataatatattgacactaaatcagcaagtcgagtttaataatattaatttaataatttataccagtaaaaaaatattaatttatatttgattaatataacaaaaggattttctttccaaactcacgtattgttgaatcattataataatggtttaacaatcacaccacttatagaataaaataaagaatgagaatattcagatgcattatccttatatattaggtacattgctttaatttacacttatttcaaatgctttatagatcatctttatattgaatttttgtacctaaattattttattttcatgtacgttaataaagcattgcggcctgactcaaaccaattcgtgtttatccatctagggccttttaatggctataatgtcacacccagccccaaaatatttggccaatttcttggaggcttttatgagtggagaaattatacttcctagttaagtagtgatgaccaattctcatgggatgtacttggtaagttggtgttcgatcagttcatcattgacttttgccatattgtccattggcatgtatctagttggcaattaccatatttgagcttgatttttgtttattttctatttgttaaaactaattggtaagagtaattttcaaaaactgtttttaaattaatatttctatcttaatttaaaataaaggaaaataagttttttttttaatattgcctcattttcttcttctttttctagtctttaaaactagttttgaaaatcattttataaatgatttttggagacaaaaatcaaacacatctcatatcactttggatttcttaaacaaatatttattgaaaaattaagaaagcaattcttttatgaaaaaaaacctttaaaaattgagatgaataattattattttttggagggcgtcaccttgatgaaataaattaattttaacttaaacaataaattgaattaattattcatttttaaaagcgaattacttgctttttataaatacttatagcaaagtttatttaaagtggtatttgataaagagtttgagtttttaatattttattttccttgcatttcttctacatcttctcctattttatattttttgtgatactatttattattcattacttattttatttattataattaagattaagatgaattgatcaagcatgtacataatcagataaggtcattatagttaagaaaaaatactgacattttttaacactttttattattattacagttataataaaaggataattaactagttcgcttcggtgatatgaatactaaattctttcatgcgcagactcttgtgaggagaaagaggaataagattcatgatttattctttgatgatggaacttggcatattgatccgaatgatcttcgtcaggagactaccaggtattttcattctattttctcagaagatagttctccttctcattcttcctttgaggttcagaatatcccccaattgaatgaggatgggaatcttgatctttctgctcctgttacggttgatgaagtcagaatagctgtgatgggcataaaatcattcaaggctcctggccctgatggtttcaaccattcttttacaagcaatattggcctatcgtaattgatctctggaaacttgttagagatgccttcctttatggcactgctgacccgggcctccttgaaaccttgcttgttcttattcctaaagtggaaaatccaaaccatttgaaagaatttcgcccattagcctttgtaatgtggcctataaggtgattgtagttagactccgtcctttcttaactgagcttattgacccctttcaaggaagttttatccttcgatgaggtactatggataaccttgttctagcctaagaagtggtccatcacattcatcaatgcaagtctagttctggagtgcttgctttgaaaattgaccttgaaaaagcttatgaccgcttaagatgggatttccctccgagtatcattcgccttgtcatgtgggtgtaagtggttcaaatttagctgtattgtggaatggttcgaagcttgataacttttctccagctcgaggtctcaggcaaggggatcatctttccccttaattatttgtttgttctctgtatggagaggctagcattgaggattgatgagcttagggagaataatacctggctccctatctccctttccagagggggtcctcctttgactcacttgttctttgcaaatgatgttcacctcttctgtaaagctacggaagatgatttggggtgtgggattgagggattctggtttggctaacatatctctccttggtaattaagatgatttggcagttgattcattctcaagataaaccttcgtgcaaggttcaccgtcaagattggtgaaggatcttcttccttcttttttgatgattggctcggtataggccgaatctccaacatggtgtcgtttgtccatatatatctcagatacctagcttcgtttatgtgaggtctggtcaaatgttggattgaatctgaatgatgtttatacagtacttcctgatcaagtaaggaatcaagttctgagactgcgtattccttctattagaactggcaaggacttctttagttggattagtgactgttcttcgtgaactcttaagaaggggctagaattgctctcctatctttgtacctcgtcatgcaaatggagtagtggatacactgactcgttggggagctcaaaggattggttgggatcacagttggaagcatcccccgaatggagcccttcttgcactaaggaaggacaatagttaatttctttttccttgctttctgtcttttattccattgtacccaaaaaaaaaaaaaaattaagtcggttacatgaatgaatgacaagatttttcctaacaatttcaatcattgtccctcttagtctctctttcaaaagatcaataatttataagtaagataaattgcctatttcttgttctaaggtgttagacgatgccactataattcttgaaaataaagaaatataaaaagaatctaaaaatgcaacacattcgcccatttgctgcatgtaatgtgttacttaagtgataataattatgtctagaaattaaaattatattaaataattaagtttacatatttagacaaaacatttaacaatttgaagaatttatttaaatttttcttaattcagaaccataaaacaaagcttaacattttcaacaccatgatttatcacttattatattataagtatatctatagaccgatttataaaataaaaaaaaaaaggtgttaataggatttcgtatcaggttagtgtatgtttgatttgcaattataaatattacaacatacattctaatacaaatccaacatataaaaataaaataaaagtaaaaagaaaggttttgatccgttaataaaattactttttcctcaaacataattttataacggattctcaaacaatgctcatgctcttctgctctccatcctttacagccaaaagaaaatcaaccagaagcagcacaaagtgaatggagagaaaaggaaaaatgaagaagaaattagaaagatgtaaagaagttggaaagagctggagacagtcttggctgcacatgaacctagtcatgcatgttcgtcctggaacatgtgagtggaaagtgaaaacaaagacctgctatttatttattattattgtttaaaattcgaaccgaccaactcaaagtcacagtaaccccttcataagcaacgaatgttgatgacatgaattaatcatttgatattttacaaattactataatgcaaaagttgtgtagcatgtacatagcataggttatagcctctgccatgtttgtcgctttagaggcagaatgtgcatatacaatctattgactctgagactaagatttgctgagccccccccgacaagcttgtataaagtttccacttctccatgttaccgggcaaccatatttaatttagtcaccggtcaacaacattatgcaattctaagttatttttggaaagaaaaaaaataataatttgttttttaaaaaaattaatatttttccaaaaataaattcaattaaacacaaattaaatataaattctcatacacgagtgagaaataacattcatgttcttgttccccattttatttatattgcgtaactgtgacttagccgcacatgccacagataaggaagagcaacgtcatgccttcacttttcacaatgcttggattcagtaggaaaaaaaaaaaaagtgggaaatattcctgttttggaggggtggaggtttcacctgattagcagtttagcagtctgtttggcgaaacagcgagaaaaggaacacagtgaaaggaaataggaaagtgaaaaataaataagaaatatgatgatttttttattaaagagaaatattaaaaaaataatgtaaaattatttggtttgtataaaaagataaaatatttttttattaaatatataaaaaaataatattttactttcacgtaatgtgtagcacacaggtcattatgagtatatgatagattatacagcacacataataaattatcaacacaaacataacaatttttcatggcattggcttaatttggttgattttagtgtgcatatatataatcgattatatgcacctacaaggacgatagtcaattaaaatatgcatataatcgacttatcaaatccatcaagagctgcgcaagggtttagcaagatgagcaagtgtgagaacaaacaaggattagtttaggaaattaaacactgtatgtccatttccaacctgtttctcttctcttaagcgagggaataagaccatagtaaaaaccataactttaaacttatcacctttctatttcatttatattaaacaacaccatttttttttatcatcattacgttttctactccctccactcattttttatgtatttctatgctaatacactgtaaataaagttatgtttgaatatataatgatgaaggacaaaaaataaaatagaattaaatgaaaataaaacaatgctattattttactgcttagatgttttaaaatgaaagaaacgagtatatcccatattctaaattttacaaataatgatattggaattttatcagtttcatttcattattttatcagcaatacaaacaataaaacttgaaatcattatatttcatttttgttttttccatccaatatatatagcctaataatgaactcacttctagacttagataacctggtgcggcccattggtctgattcaaattcggtgacttgccttttgggttagtttggtgaactatagaactgctttttgtgtaatatggttgacttgtttctaattttaattttcggcctttagtcaaaataatttttttgaagttaatttattttgcctgggaaagttttgactccaatgttaaattacatgttttaaatattataattaaattatattctatttaaaatatataacattttaatattatattctgtttttttattactttttaaaggtttttttaaattccttgacttattaaattaattgataatgttatcctttttgtgaatcgacctccgatccgaatcacacacctatgctcaactatgtccacatatataatattcatgaaaatgcaatgacaagtttatctttaacaattatagattcttcttttagtgtaagctttttggattactttgctttccattttcttctctttttagtatgtgaaaggacaatcccaataatatgccttaagccacatttctcattgccatgtgttactgcaaatcttacggaatgatttttcccagcatccaataatgcaatgtgcaaacacatccactcatttcacagttggaatgagcaaaaactggacatgtgtttcaccgtggcatgtgctgtttacctcgcagctgaaccggtcacaatcatgtttgtggttttggccaactgtgtttgtttcaatttattataaatttaattttgtatcattaacataaaaaatgaattataaaaatattttatatttaaaataatgttttaaaatatatttaaataattatttttactttaatataaatactttttaaattatgaatcttatatgcatgattgattgcacttttgatcctcaagtattataagataaggatgtcaatcgaatttttaagaattgtaattttctaattaaaactttttttataataaaaaccgcacatttctcgcataattgtgatgtatacatgggaatcaattaataaaattaaaatataaggaattaaaatttcatatttaaaatacagaagagcctaattgacataattcaaatttaggtattaaaacaaacatactttcatttatattatatcactttttatttaaaatatttatatcatttaatatacatatttaatatacatttttttttcattcgtacttttattttcactcatcaaacaatttaaaaaatcaattcactttctattttttcttcttctttctttttactttcttctccaaaccaaacatactattagttggtgttatttagtaatgaaagacaaaattcttttacacatcaagattagaaattaaagtatgttttatcacatttaattaataattttcatatataaaaggattaaatatgtttttggtatcgaataatatttaaattttacatttaatctataatattttttttcttgacttctgatccctgaaaaaattatattttatctctttcatcacattgactttgttaacttaatacatcaccatttgattaaaaaaacaccagtggttgtgataaaaaaattaaaagatcaaagaaaaattcaaaaatatttcagaaatcatgtatattctctctagtacgcatgaaaactttttagatggttcaagtattctctttacctcgtgtgtcgcagatattaaaaaaaaaaaaaaaattcttttagtcgttgtattctaattttgagatggtattaaacctccttttaaggagtactattgtgcaactcaatgaatcgccttgaattagtggctaaattaaacctgaatccaattacagatcatttaagcaaaccattgatatgtgctataataagaaacatggttatctcacaacccatcaggaaaagttgttcaatggataattgtacaacccttagagaatacatctcagatggtgactagagtcaaagagggtatggagagcacaagtttcttcttgattccagagtggcataaggctttgttggtattgctactagactctcgtcacacagtacaaatccaataacttactcagacgtcaagtattgtgtgtaacttgtttgggtcttctgagccaatttaatgggtactcaacactgggattatttagtatttaccatcatatatatgtgcatgtcattccctacataagtttcaatgtcatagaaaaataaagcctgtctaagttaagttgtaagatggtgtgaaaccaacaaattttaattcttactaacatgtcaatagcatgttaaattttttaataaattcttttcaattaattttagaattttgtgattggatcgccagagactaacaccgtaatcttcttccattaaataatattggcgtgggaacctctatccatgaattctctttcactcccatgccacacactctctctttgaattttgtttttcccaaatcattatctctaaaatgactaaatcccctatgtaatggtttgcatccatatggctaattttcctagtcttgtcttgcatcaaaatggtagtatacttgctttgtcctcagacagtggaaatgaagcacttgaataaatcaagtaatcgtacgtttttattccaattctgtctcatttctttgcttgatcactttttcatgtgcatcctttatttgtatgtctaccgcattggtgaaatggtagtgggggtactactgattaactatttataagttataaccatgggcatggcatagagtacttttggtctctcctttttttgcttcttacctgtgtttaggagcatgccatgattgtctttcaattattatgtgttaaataatattgctcttatcctttttgaacaattatactttttatgtaacgagtattttagaaggaatttcatcttcgttcttgaaatcatatgtatgtcagtggaatgcaatttaaactcggcattgtgctgcttcttttttttcatttaatagagatcttgtgcgcacgtttagaagaccttttctttttggtagttctaggagacctttatttcagagtgaataatcacttattttgaaaaagttatctcacaaaattgaaataaaacaagagattatttttctcaaaataagttgaactaatagatacataagtattcacctaattgaattataaattaataatgggatagagatatcaagtttatgcttgtccatgcgataccacaagtttgtgacagatgttaacgaagtgagttccattacattgattaagatagatatgctaataaaggtttttataatgcagcagatatattaatgtgctgttgtgagagaaaagaagaaaatgagcgcagtactgtgtgaatgtgtgcgactgtgcgagatgtggaatgcaatctaatagtctattagaatcaaaaaagcaattaaagaaacagaaaccagttgaagtggttgggtagttattgcttcttttttttttaacaaagatttaacagtattagttttaaggatttaataacaaaattttagaattataaattatagagatttaaataaaattataatttaacccaagaaaattttcttaacaattaagaaaaaaatacatataaagataacaaaaaattgatttaatttaaaataatcaagaaatatttttttttagttacgtcatcttcatgttgatgcttacaaatgttgcttgattaagttaagcaacgttacttgctagacaaaatttattattgtaatatttcttatacaagtactgttccttatataagtaagtttttttctcaccaaaaaaatataagcaagttttttttctttcaaggaaagatatgtccttaaaatttgttaatgttttttttgttttaaaagagagaaattaatacatgttaagatagataaaattaagttaagtatttactttaaaaattttagtattatagtaaatttttgtgtaaattacttaaatttatatgatgtcataggattcataaaagataagtaaactcatttaagtaattatgtactgtggatgttactagtagttaaaccaattttaatttnnnnnnnnnnnnnnnnnnnnnnnnnnnnnnnnnnnnnnnnnnnnnnnnnnnnnnnnnnnnnnnnnnnnnnnnnnnnnnnnnnnnnnnnnnnnnnnnnnnnnnnnnnnnnnnnnnnnnnnnnnnnnnnnnnnnnnnnnnnnnnnnnnnnnnnnnnnnnnnnnnnnnnnnnnnnnnnnnnnnnnnnnnnnnnnnnnnnnnnnnnnnnnnnnnnnnnnnnnnnnnnnnnnnnnnnnnnnnnnnnnnnnnnnnnnnnnnnnnnnnnnnnnnnnnnnnnnnnnnnnnnnnnnnnnnnnnnnnnnnnnnnnnnnnnnnnnnnnnnnnnnnnnnnnnnnnnnnnnnnnnnnnnnnnnnnnnnnnnnnnnnnnnnnnnnnnnnnnnnnnnnnnnnnnnnnnnnnnnnnnnnnnnnnnnnnnnnnnnnnnnnnnnnnnnnnnnnnnnnnnnnnnnnnnnnnnnnnnnnnnnnnnnnnnnnnnnnnnnnnnnnnnnnnnnnnnnnnnnnnnnnnnnnnnnnnnnnnnnnnnnnnnnnnnnnnnnnnnnnnnnnnnnnnnnnnnnnnnnnnnnnnnnnnnnnnnnnnnnnnnnnnnnnnnnnnnnnnnnnnnnnnnnnnnnnnnnnnnnnnnnnnnnnnnnnnncaaataaatttacctatgtaactaataaaaattattaccaatacttgaaaataacatttgcataactataggcaacagagtatcaaaaatcgtagatgacatattacaaaattttataaaaaaaaacattacaaaccatttatagtcaattaattatgcattatcaatgtaataaattcataatttaattaactaaaaaatgtttgatatatatgatattgcatattatcattatttaaaagatataaaagattggatttcatataaggatataaaacaaaaataaatataaatacaatatacaatattttacaattggatttggtttaatttccacaatagaaactggaaaacaaactataccaaacaaatgttttgtcatttaaaattttgagaataaactttttaacatctttaataatcataataatacatatttttaatttctatatgttgttaaatttgcttttagttttctaaaaaaaagttattggttttagtctataaatttaaaattttgaaaaatattatttattgtcatatattaataatataatactaccactatgtcacatcaaaattatcactaatatatgacacattaccactatgtgataacaatcaccatttaaaaaatatatatgaaggaagaaataaggaaaataggattgagtaaaggatatgtctgaaaactgaaaagtggagaaataaaaaagaaaatgaaagtgatattaactaaaactgtacacaacatgtctcatagtacaagacttggctctgcctttttgagtgttaggccctcataaacgtacttgtagtatgcttgctagcgagttggcttctttttcaagttcagtggctaacccaatatggttggcatcaacccttctttaggtcatgcatgcttttttaattatatatatattttttttttgccgacagtttgaatttcttttgtcatcctcgacaaaataatagcattctgttaagtcttcaacaaatgagtattgttactagtttattctattcatcttatccttacgtatccatctaatttttagctatatattctctataagcattacctatatattttgattaatacacacacatatatatatatatatacacacacatacagcattatagctgggggtggggggtttcctaggcggttttcttggtcatatattcgtcgcgagtacgtggttacaaatttgaagcaccgttatgcattatccatataatacaaatttctattgtgtcactacaagttaattattggggttctgttgtatagtttccagcaatttctaatgtatcactacaagttaattattggggttctattgtatagtttccagcaaatcatacaatttaaaatcatactaggaccacaaaggaattttagttacatttaactattcaaaatactatgggatcacagataaatcaaatctgtaaagtgttgaatactataaatagtaaattataaccgggattcttcctagatccaacttccagaatgcagtgtgatcttttgaaaaagcaaggaagattttggctgacgaaagcgtccaaaatatattcagcatatatccaatattttctatgcaattcttgttaatgttgtgattgttgttcctttgtcatagtaaaatatcttcagcaatgtttatatcaattatttgtatactaatgttgaagaagacgcgtggctatcttcgcacccattcaatctaattgctcttgtcgttttagcataggggagggctccatttttctgcaagcatgaaatccaggatctaaaatactagaattatagtatttagaatccccgttaaccaatatgcatatcattgcgtagtgaagtgatgattggatgaaattaaagcaccaaatgaatggccaattaagagttatagcaaattctcatattatttgaatatttaaatcagatactaatgaattatattgttaaaagaataattaatatttctatttttatgaaaaaataaatattaaaaaaaacatgtaaaatgagaccaaccaatgctattacacaatgtctcaaaagaaagatcatcaacacatgcaacaccaaaagaatttctacagaagacggtttattaaatataaatatgtaaaaggtgggttgtctttgaaggagagaaaatgagagctataccctgtagcagatacttccggagacccttggaagaaaacttaagtggaagaaaacttttagatactttaacatatataatcctaggtgcatatcatagattaattatagactcatacgcccatgatcgacccaatatatatttgtgaacgttaatgggaattaataattaattaaattgtatttgtttgaaatcaccttcccctctaaatggaaagtgacccataggccgcctcaagcacctcttgaagtcttgatcataccattaaaagaaagtggtgggccttgttgaccatgaccagcaatgcaaccctgagaatagttattatcatcgttcaatttcctatacatacgtgtaatctagcaaatcaaagataaattaaaggtgcattaattctactcatgattacactttccttgatatttttgtggtgtttgttttcatgttgtttgattgagaattatgtcaagaatgcgtgtaattaaaatgacatctttagtaatatttcaggaaacacttgtcctctctacagatgcaaattctattttctttatgttgctaaaatcctgtttagtgagttccttttttagggatgtaccttaagtttcaaggattagttgagagctaagattggattaaattacttatcatttaagctgagtacaataattttttttaagtaagtctctattgatactcctaatatgttattaacaatattttcggtaatattagaggtatcttctcaatttacaatttttaggtaatatttttaagttaacttttttaggtcgatcctgagtcgaatttaattctagctttttaagcgtataatattatatatatatatatatatatatataataaagaacagtgttatatgatacaataaaattatttagaaattttatgggtggaataaaatccatattttagtacttttcaatccatgaaatattcacttagaaaatagtctctagaatgtacttgatagattttggaaataaatttttgaaccatttacccatttccaaaatcaatttgagaacgtagtttttaaaaaaataattttagaaaaatattacaaaaattacaaaaaaggaggtgtctaagtaaaaagatgaaacaaatagcaattgctctatttttttgtctttgttgtttctcctaaatggtttgaactcgatccatctcattcattttttatattcaatttttggcatttgtatcctgctccttccaatatgaatcctacacctcccagaaagtgactcattataaattgacttattatactcactatgaaactaaagatactgatatcttggaagcattccaataaactactcaatatgataagtaaatcccatttaatggtaaaaaaataatgaaacaacggtatcttaaaataacttattaaataactagtgccggaaatacttttaatttcatgcatacgtgaagcaataggcttaatttaattaccttgaggagtgctggacttctgaggatgcccttttgcttatgagttctccatgttggaaaataagtctccatgattaaggggttaaagtacagagaaaattagagtgtggatagatgaaaaaagaaaaaaaaatattatttgatatctactcatatagagagtagaaaagttaaaatataaattactcttgattaatgttattgcgtttgttcgaattttctttgctttgtcatagtctagaaggattgttatacaaatgaaaaacgaaaccggttcaaacttcaaacgttcgcgtcacggcctcttctgtattcttaactcatagtcaatgatcaatttctcttaaattaaaaaaaaaaaaatcaacaagtgaaaacttgtttattaaagttccaaacaattgaaagtcatgtgacttgtttcgctgaagaacctcaagagcttctgtaactttaagttcccattattgaaaaaattagtagtgacggcatgttattggtttgagtacaccaattttacaaagcatatacatcatactcctaacatgttgttagtttgagtaatacaagacttagattttgttaaataaaatcttgagtttaaaatttatgaaagaaaaaacaattaaaagaaaaaatttcattataagtgatcaattaaattttttagcaaaaactaattattaataaaattaataaatatttcacaccaacattaatattatatatatacacgttgtacgtgacgaaaagagaagagaggatgatgctggaaaggttatttaaatgctaaaaggatgcaatacaaaaatattcaaggaagagttatataatatgtatgattgttttgactgaatttttattttccttgttctttttctcctcttttaaaagttaatttaaaataattaaattaattttcttaaataaaaaatgattgaaatgttgatgaataaaaaaaagagcaataaaattgaaaaaaaaataataaggcatgccattttgttgccgtaacataaagaaacgtgcctgtgattttacacgggtttagtcaccaacttgtactactaccattcccaagctaagcttgagaattttttccgttaaacttgagagtttctctgaaaggaagaggtgctgatagaaactaaaccataaaaagtttgctcatactacttatatatagggatcgaaatgttaaaatggtgtaattataagaactaaaacatcgagcgttagatatgttattgccacatcaccgctacgtcaatgtcatactaccacaatgttaaaagctttagagcagatttgacgacaaaaattaaaatgtaattaaaaaatgtatatgcaaagacttaaacgtgtaatttctaaatatataaatcaaaacttaaaaataatacaaatgcaggaatcaaatgaattttcgaaattcagtccatttctcctttggaaatttaccaaggtttgaaccggaccgaccgggtgggaccttggatttgaaacggatgacatcttgtgtctggatattaatggaaaaaaaaaaaaacgacaatgcatggttgctgcattatcttctttaatcccttgattcatttcctgcataaggttggtcctttgaacattgctctcattattgtttttttgggttttcttgcagcaattgctacttactggttcactttttggccttgctaccttctcccacttgactattgaagctcttggagacacagcagtggtaacaaaataacataaaaaaaggtggataatttggagatttttaaaattataggtttaaatatcattttaatccttgtaatttagtgatttttttttattttagttgttacaaaaatctgttttttacttttagtccttacaaattatatttattttatttttcatcattatgacactttagataactttttttcattattcaaagcatagttatcaatcgtggatagcaaagcagagcaaccactctcaaaattggaatagcggatagcgggatgattgttattttaatatttttatatatattaaaaagtttataatataaatatataagctgaagaaaggaaaaaagatgaaaggagtaagttgagaatttatagaaaatgggaggtgaaaaaatcaagtcccattgtggagatatgctagagcccaatgtttcaatataagtccaaaatttctcacagaccacacttgctccacattataaaaaattgtcatatttgctcccaaaatttctcacagaccaaccacttacttcaaccttttcgccccttttcacacttctctctctcacttgcatcagtgcatcagcatcacacacaaacaaacactcccaatctctctctctatccgactctaatctcgtgatgctccgttgcgcaaccaccgcctctccatcgacgtgtcggtgactcccatggcggattcagccttcgcaaaggtgtggaagaaagtgagcccagacatcgacccgccgaagacgccactagcgtacatgaagcccagaccacccactccctcagctctcccatccaagttcacagtcaacttcgtcttacctgtgactggtgagcgcgaacaacgggccgacgatgatgagaacggcggtcaaagcgaacagtgaatcgtggacgcatcactgcgatcgcgcgcgcgacgccaccatcctatcacgggcacaacagccgcagccgttaaacgcaccgctactctactccttatagtggcacatgtccgctccgctgcaatcgcgaccacgaggcccgctattaataactatggttcaaagctctaaagtattttaaggactaaaaacaaaataaacataatttgtaaaaaataaaaaaattacaaggaagaaaaataaaaataaaaacattaaattgcaaggacaaaaatgtattcaaaccaaaattataaaattaaaaggaggtacaggaagaaatatgtgggctgcaagaagtaacggcccggcaaagtttatcacaatgattttgtttggacttagacctattggacctcctcccattatcgggtcattaagtagagggatagctaatttataagtaatcttggggttaaatccaattctaagagaagcgaacaagccaataacaaaagctattatcaaaatctcttataagctattatcgaaatctcttataagtagaggtataaaacctgcaaagcattacaaactaatttatttgcctttgttctccacaatcctgccttctttctatagtttcttggctataaagtctaaacatatactgaacacaagttgtgtccacccaaaaacaccacccaaagatttgtgcacacacacacacacacaacttgtccccccaaaaacaccagtaactagttggtcaccacccacacactcactgaaccatctttcattattgttgttatgtatcccttccctttaattaaagagattaaagacatcggcaaagagttacaccatccccgatcgaaagaattgttgattcaatgcgagtatcattcgctatataggtgttgaattcgagtgtaggcttcctattttgccaaaatctatcttccattttatcgttgttctcagacatagccaccgtaccaagccataaggtgttgtcgtatgcaattattccacctttcttcaccaattttaacagcagctcgtgatactttataaaatttttcttgtcagcgtccacaaacacgtaatcaaatgtatcttcatgtttgccctgcaatttatcgcagtttatttttatttttcattctttaaatatcaattcaaagacaatagataaaggatgttgaataaaatacaaaactcactttgtttagaactactttatatatagagagagacacacgcgcatacacaaactcatttttataaatgtaggggacaaaatcaagataataaataaaacataagcttaataaaaatgtaaagaataaatgatgtaattgatatatatatatatatatatatatataaattgacnnnnnnnnnnnnnnnnnnnnnnnnnnnnnnnnnnnnnnnnnnnnnnnnnnnnnnnnnnnnnnnnnnnnnnnnnnnnnnnnnnnnnnnnnnnnnnnnnnnnnnnnnnntatttgtatttgtaatatagaaatgtctttttctaaaattagctgtatgaaatatgggcaccggatataccgctgaaacttactgtactgtataatggctgatgtttataatatgaaatagaaaaatgctaggtgaagacatttgggacgggatacactgatgtaatttcgaactaaatttgctacagcaacatctattttattctcgttaatgatgtgattgtttgtgtgtgatcatggagcggaatgctggccagcacataggcaacatgagcataaaatagaggtagcagaaatnnnnnnnnnnaaaggatgttgaataaaatacaaaactcactttgtttagaactactttatatatagagagagagacacacgcgcatacacacactcatttttataaatgtaggggacaaattcaagataataaataaaacttaagcttaataaaaatgtaaagaataaatgatgtaattgatatatataaattgtcaaagaaaaataaataaaatatgtatcataagttatttttaatttttatttaaatattttttacaaatttcctattaattactagtttacataaattaatatcatatcaaactttcattatctttcgattaatcattaaatgaaatttaaaatgagacacttaatttaaacaattaaacaaatgtaaagattggatataattttttaaaataaaagagactaaattacaaataagtcaaaatatgaaatctaaaaatgttatcaagccaaaaaaaaaaaaaacacttacatttataagatcatggagggcagatagtgcatccgcttggataaagtcaattttgtgctccactcctgccttctgaatgaagggcaatccaatcccgtaagcttctctatcgacatcaatcgctattatctgcaacattcgcaaaatccttttcacactttattcattattttatatttcatatgtacatatttgtgtaagtttagaaaacatccataagaataaatgaaagcatgataacaaatacagtatatgaaaaaattgttgattcgtgtgctagccgtggctgagattacataggaaaaaaaaaggaaaatgtttgatcgacactcaaatgttgaaaaagttaagagaaagaagtgaagatgtaatagataagatgatgtgataagagagaaagtaagagaaaataaaggttgtcaatgaagtagttacactgttgtgatatccaaaaacaaaaattactataaaaaaatgttaatgtgataccttgccatcagaaggaagagcgagagctgtagaaagaagagaataacccgtgaaaactccaatttctaatgttttctttgcgttcatgatttttagaagaatagataggaattgggcctcatccacgggtacattcatcatgctcctgccagtgccaccatacatacatacatatcactatttttttggtattaagggggccaatggcccaaaaacaagaaagacttagggtctgtttagataagattctttagaaatacttttaaaagaagaaaataagaaggaaaaaataagatgagttttttcaaaagcaaaaataaacttttcattatctaatttttagaagctcaccgatataacttcctaaaagatgagatgacatctacaaaatgagttaatggaaaactcattttaacttatggagaagttcatttcattattttcttcttactttcttcctctaaaagtgcttctagagaaacttacatccaaacaggcccttaataagacattgcacaaggtgctgaactagttgttttacacatgttaggtgtgtgtctaatagaagacttgctcccatctgtgttgcatttcactcacccaattggagggggtaccatctaaattcaatgaggctgggtggtatatgcagcatttgatttagcgatcctttcagcattcaattgcatttgaatttgattatacacaatagaattccttatgtgccaaatctcatatatatacagcagctacaaacagacttggccaagaaaaaatggtgtcatgcaagggaggatttaaagggcctttactgttttaaatcaggaggagggacatcgagggatttccaaagttgaacaagagcaacacaatttcaaaagatgtgggagagagattcacaaagtctattacatataataggacagatagtgtgatagaggtagatggggtcagatgtattctaggaggtgtaaatagtaatgaagctgtttagttaatagaataaggagttagttacagttaactaactcaggaaatgtataaatagaagtgaggataaggaagagggatcacaagagagtgctaggaggttgtgatatcccttgaaagaatcacattgtaagctgcaggagtttactccaattctaatagaaagttcattctaattcctattcgatttcctctgatccagttcctattaactggtatcagagctccaatcttggggctttgtgccgtagatgagaacgaagaagatggaggctagaattgaggcattggagcgcgctatggaggagtcacacgagaatagccatctgaaccaagtcgcgatcgagagttgattgggtttgatggagaatctgcttcagcgattggcggcgacgctggacaattcagatagggaggatacaattcgcgtgaaggagagaaaaggaagaagcaaggaaagaaacgaagaagtagcacgaaattggaggcaaatggagttgcccttgtttgcgggtgatgacccagtgggggtgggtcgcgaggatcaaaaggtatttctggttacaggaggtgagagaggaagagaaattagaagcggttttggtggctctggaaggagaagctctgtcgtggtttcaatggtgggaagaatggagcaagaaccggtcttgggagggattcaaggtggaggtggtgcagaggttccaaggagcaggaatcacaatcattttcaggctttgctagctctgaaacagggggatagtgtacaggagtacattgggtagttccaaaaacaggttggagctggaagagggttggatgagaaatttctaaaggaaattttcttgaaaggtttaaaggaggaaatagggagagaggtgatgatacatgagcccaaatccttgttggacaccatgattaaagcccgatagattgaggagaagaacagggtcttgggcaatttaccaagaagtgggaaattgaacaattattttcaaagacccaatttctttggtccaagaactaggagagtggcagccaggaggagttaaaggaggggaacaaacaggggtggtgaaagctggaggagaagggtggaataggaggaagcctatgcaaaggctgtctcctatggaggtgagtgaaaaaatgagaaaaggggaatgcttcacttgcaatgaaaaataccatccaaatcatgtatgtaaaaataagcagttaaggatcatgattatggaggaggatgaggaaggcaatgatgaggaggaatttgaaaaagaagaaactgataagaaggaagagttgtaccagctttcactatacagtattcagggatttatcaataaaaaatctcttaagttgtggggagaagtaaagggaaggaaggtggtggtgttgattgattgtggtgccactcacaattttatatcattggcattggttaaagaattgcagctagaagtgactcctacacagccctattttatggaagttggtgatggacataaggtgaggtgtaaggggatgtgtaaggatttatccatagaattacaagggttaaaattggttcaaaattgctatctttttgaactagggggagctgagttggtgttaggggtggaatggttggctggattgggggaagttaaggccaatttcgaaaagatgacaataattgtgaaggttcaggacaaagagatggagctaaaagctgaaccagagttgattaagtctgctgttagtttgaagttgattaatgggagcttggaggaagaggatcagaggtttttggtggatgttaaagaagcagaaaaagtagaaaaaagagcagcagtacctgaagaaattcagcagatattgcagcagtttgaaggggtttttactgagccaacagaattgcctcctcatagggacagagatcatgctatcacactgcagcctggtaacaaaatccctaattgtaggccttataaatatccaaactatcaaaaagatgaaattgaaagattagtggagaaatgttgaaagctggaattattagggctagcactagtccttttgccagccctgtaattttggtaaagaaaaaagataatagttggagattttgtgtggattataggctattaaacaaaattattgttcctgataggtttcctattcctattattgaagaattattagatgaaattggaggtgcacaatggttttctaagctagacctaagagctggataccatcaaattagaataaaggatgaggatgttcataagacagcttttagaacacatgaagggcattatgaatttttagttatgccttttgggttgactaatgctccctcaacatttcaagtattaatgaatgaagtgctcaggccatttttgaggcagtttgtactagttttctttgatgatattctagtttacagcaaggacacggatgaacacaaactgcaccttcaggcagtgttacagatactgcaacaacaagagttgcatgtgaatgagaagaaatgcaattgggcccaagaatcattggaatatttgggtcatttgatttcagggaagggagtgcaggcagatcctaataaattagcagctatgagcaaatggcctatacctaaggacattaagagtttgagaggattcttaggtttaacaggatattatagaagatttgtgaaggattatgggaaatgggcacaaccattgaatgctttgttgaaaaaagatgcatttaaatggactaaggaggctgagaaatcatttgagaagttgaaagaagtgatgagtgaattacctatgctaatggtccctgatttctctaaaccttttgtgctggaaactgatgcatcaggagtgggcttaggggctgtgttgttacaggagggcaggcctttggctttttggagtatggctttatcaggaaggggacagcttaaatcagtttatgaaagggaactgatggcagtggtattagctgtgaaaagatggagacattacttgttgggagggaagtttatcataaagattgatcaacaaagcttaaagtttctaaatgaccaaaaattgttgactgaggaacaatttaaatgggctgcaaagctgattggatacaatttcgagattcaatataggcctggaaaagaaaacattgtggctgatgctttgtcaagacaatttcatttttctgctatctctttggtacaagaggaggagtgggcagattgggaagaagaattaaaggcaaattagcagttgtatgagtggagaaacctgggtatgaagtgaaaggagggagattgtattacaagggcagattggtgttaccaaagaattctgctagaattcctctaattttgaaagaattgcataattctcatataggagggcattcaggattttttagaacacataaaagggtgactgatgtggttttttggcaaggaatgaagaaagctattaaggagtatgtagctgaatgtgatgtatgccaaaagaataagagtagtaccttgtctccagctggtttacttcaaccattacctattccaaccaaggtatggtctgatatatccatggattttattggtggattaccaaaggcacaaggaaaagatactattctagtaatagtagataggctgactaaatatgcacactttctggctttgtgtcatccatacacagctaaagaagtagctgagatgtttgttcaaggagttgttaggctgcatggctttcctacctctatagtttctgatagagataggctgttcatgagtttattttggaaggaactatttaagaaggctggaactgagctgaaaatgagttctgcttaccatccacaaacagatgggcagacagaggtagtaaataggtgcttggaggtctacttgagatgcatgacaggcagtaaaccaaagtagtggccagctcatttagtttgggcagagttttggttcaacactaactataatatttctgccaagatgtctccttttgaagcactttatggacagaaacctcctttattgataaaaggagctaatattccttccaagttggaggaagtcaatcaactgtgcaaggacagagatgagcttttgcaggaattgagagaaaatctgttgagatcacaagatcaaatgaggaagcatgctaacaagcatagaagggagttaagttttgagattggagattggatttttctaagaatacaaccctatagaatgaagtcattggccagaaagccaaatgaaaaattgagtcctagattctatggaccttataaagtcatccagaagataggtgcagtggcttacaaattggaacttcctgctgagagtaaaattcaccctgtttttcatgtatcattgcttaagaaatcagttaaagcaaactgttcaccacaaccattgccagcagtaatgaatgcgcagtgggaacttcaaatgaaaccagaaagggttatgcagcaaaggcaaaatgaaaaggagcagcaagaagtattgatcaaatggcaaggtctacctcaccatgagaacagctgggagttggctgaagaaatgaaggtgtttccagaattggaccttgaggacaaggtccagcttcaaggggagggtattgatagaggtagatggggtcagatgtattctaggaggtgtaaatagtaatgaagatgtttagttaatagaataaggagttagttacagtcaactaactcaggaaatgtataaatagaagtgaggataaggaagagggatcacgagagagtgctaggaggttgtgatatccctcgaaagaatcacattgtaagctgcaggagtttactccaattctaatagaaagttcattctaattcctattcgatttcctctgatccagttcctatgatagtgattgttataatgtcccttttaacaagggccaatttagcaacacaatctgtataactggtttggggatagagaaagcggtcaaatgataggctgtgttgttggttgaaaacaccatcaggggtaaggttccagatgaatttgtcatccccaagattaggtcttggaggtacagaagctataatatccaaacaatctaaaatgggaagcaagtgagaaaatttagataaattccataggccaccctcatcaacatactataataatcttggatgacacctatccacctaaattgacactcatttaatttgcaattgcccatctaccacctttcataatccactcccaagtactttgaatcgccctccaaacctttgagcaattttgtttctttttcattagtggtctgaaacctgatgtttggcgaagttccaattccaaggccttagcatgactgacattcttagaaacaaataatctggtttttgttatagaggccttctggccagaggcttaagacatcaaggcacttcatgatagtatccatatgatatattaatagaggcttcccccaaaagaaggaggccatccgcaaagctaaatcactatgtatgatgtaccgttccttgaccaaatgtgttacttagagcatctttagtggtaaatcttaaattgggatcttagactacttgttagtggatcctatagtatcacataggattaaagatctctcaagatctctctaattttttcctttaacggtagatctcattttgagatcttagggagagagaaagaaagagaaaatttattcttttttgaacaatgtgcagatctttaggaatcttgtacaagaactcattctccatgttagagatctctccacttcctttattgggagatctagtgaatatcagatcttgagttcaagatttttacttaagatctaacactaaagatgctcttacatgcttaattaaaaaaaatcaaaaagaagaaaaggaaaaaactgtaagattgatccagttaactaattagtaattataagttcataacagctttgaattaattttacacatgcaactagataaattgtacgtaactgtaacttacttaaccccgtatttctgctgtgttgtctctcggagttgcttcaattgctcgtgctctttgggatagccactcgtttcaaagatgtactaggtaaaaaacatgcagaaaaatacagttaatgtgtactttgtatattgtaaggaagcacaaagtatgttgattgaattaggaagatcacacgagccgtatacatcagaataaatggtttgcgagaagttagattttctgaatggagatgaagatatgcaaattcttttcatattgattttgggcaaacgatgaagctagactgataattgattaataaaaaaatattttacacaaaattgataaatggggcttgtggggttgctgatagtgccgatcacagaacaaacatgatggtcgaggtgtttcattttgcttgcagagaaagaattgatgattatagcaaattaagggttataatattatattacatgtatgagattgatttcaagtgtatatgcatacatgaagcaataggcttaatttaattaccttaaggagtgctggacttttgaggatgcccttctgtgctgatgagccctccatggttgaaatacagagcaaattgcagggtgtctttagatgaataatgaacttctcaatttagtggctgtagagtgtagagaagaatataaggaacttcttttttataaataagaatataaggaacttgagcgttgacctttgagatcagaagcaccattccctacgtggcagtcggccacacttcccgtcattctaaaatgaaaacaacaattacttgacacacttagttttagagatttttagcagtagatcataaattgatatcttacattattttttttttttggtagatttcgtagcaatattaagtagaattgaagatttttttctttttttttcagtgtaaatctcattttaagatttaatgagaaaaagaaagaaaaaatattttttttaaataatatgtatatttttagaaaaaaattacaaaatttatttttttttcttctttattagaaaatttagtgaagatcaaaactgaaattcaagatctctattcaagatctagtattaaagatgtttttaagtctaaagaggaagaaaaaacagaaataataaaattataaataagacagataatttgataatttaagaaaaaagatatcaaacaagtatttgtatttgtaatatagaaatgtctttttctaaaattagctgtatgaaatatgggcaccggatataccgctgaaacttactgtactgtataatggctgatgtttataatatgaaatagaaaaatgctaggtgaagacatttgggacgggatacactgatgtaatttcgaactaaatttgctacagcaacatctattttattctcgttaatgatgtgattgtttgtgtgtgatcatggagcggaatgctggccagcacataggcaacatgagcataaaatagaggtagcagaaannnnnnnnnnnnnnnnnnnnnnnnnnnnnnnnnnnnnnnnnnnnnnnnnnnnnnnnnnnnnnnnnnnnnnnnnnnnnnnnnnnnnnnnnnnnnnnnnnnnnnnnnnnnnnnnnnnnnnnnnnnnnnnnnnnnnnnnnnnnatattgaaaattttagtgttatattagcaacattaattattttttaatgtaattgagctattactttttgctttattttcgatttatcattgggttcatctaccaccgaccccaattaatttgggttaaaggtgctgttgatgttgttgatgttgatgtttgtgtgtgatcatctcataaattttttgatggaatgacaagtcaatggattatcataaatatttgttacttgattgaagaatctaaaatcattttttatttattttacatagactaaaaaaatctttaaaagacaaacaaaaaataagatatttataaggaccagattgttatataagttaaaatcaaattacaaacaaccaacatcaaatggaaaatgtacaaaaaatgtaagcaaaaagtaaatgaattttaggattaaacttagttctttagcatgaatggagatgtacaaattataaagtgaactgtcgaacgacaaagtggaaattgaaatccctttctcacgtatctcaccccttcctcctgagagcaaaccttcgtttgcacaactagaaaaaaaccacctcatgagagcaaatcttcagttgcacaactagaaaaaaatcacttaatcccagtgtccggaggctccacgctatgcacaggtaaaggggaggctgttttcggattcgaacccatgatcaacagatcaccaagacacaactttaccgctgtgtcagggctcgccccttcctcctgagagcaaatcttcggttgcacaactagaaagtccatatttaatcgaaatgacccagaagaggaaatacaacaattgtctaggaagtggcaatgttcatgaacatcaagcccccaagtgagatgtcactaaatgcccaccaaattagaagccaatgccaaaacaaataacagattaaaacttattcaaaaatctgaatttcaaaatgttgagataagaagatggattaatgatattcctccctttcagggattgtcactgtaactgaagaatgtacaagatcaacacgaaagctccaaaaatcatctcctctgccaccaatctgggatttttaacctccggtttctatgaacagaaagtttgacccctggaagcttgtgcttgacctgtctccacagcatatcaacagcatcttctctttttggaggatattggaattcataatgatgggagatgttttttagttgcctccacatttcagtccatttctcctttggaaatttacgaagttgatcgatcatgtagccaggctgtaatgcctctttgaaagagaagaaaaccgagaactgggagtagtcgatctcatcctcaaatgggagttcaatttgatcactcacaatgacaggaatgcaatgactcacaatggcatcaaaaagccgacaagatgatggtgtgtctcctgctggatgcaaacagaactttgatgaacgcatccctttagatgactgttgtatcaagagcagtggataaaggaacactatagttaatgattttagcatgatacgaaaagattaaaaaaaattgactataattcctctcccctagcaaagatagtaactcatcttggttatattgcaaaaaaagtttcaaagtctttccaccctcaaaatgaagcatgtttttgattcaggatatcatatgaatgtttttgagacagagaaagtgagaaatctaaaactagtaatatttcaccaatgcaagatttatcagatttggtgggggggagctcgcaaacaattcattttgtctacagaaagcaaattgtatctcaacattcaagttctcagagtcagaatgcatggggaatacaatatgtagagaagtgcagcacatgggtagttcttattgtgtaagttatctgaaatatctttcgcttttttaaaggaatcctggcctttaatttacaatgaagaagaaaatagttgtaaaatcaatcttttaaatggttaaccacaaatattccagctacaggtaaagtaagcaaagatcaattacataactatactgcataccgcttttatgttctcttctgtagcaacacttcgctcatagtgaacatcatcataaccagccaatatctttgctagtttaacacggacaatccctttctgcaaacatcacagacgccacagaatcaattatcatggaatttaaagaaggaaaaagctcctctaaacttagattggctttaaagtgagcaagtatgggtatatccacctttggattttaccgagttaagatcacaatgcactttacttgctcactttaaagacaaaattactttagaagaaccttgtccaattaagaaacacattattcgtacaactaactctcagttagacatacatctttcctgtaagtcctccctcggaagaaaagcaatgtggagcgagactcgtatggatcttgaggctcatcatctgtaaaagagtccacaacatgcacatatggggacaccacatctttgttcaaattagacatgcccctaggatagcgaccaaaatccacaacaacctgaatcgattcattcaactgatctcgtaggaacctaaaggcattggggtgcgtcatgggaaatacatggtctctacctccagacctctgccagtacttggatttctttaataattccattaaatcaacctgacaccagaaacaagccctgtttaacattgacaacagagatttgtaaaacaatagctatgatgcacagatacaggtacaagtacaaacttacaacaccctgcatttctgaaaaaaaaaaaaaaatacaatgtaagcatggcaagaaactgtataacatacataaaatcccttacatatcaactcaagaaacaattcaaaacaaaaaagctaacaattgtcataacacatcataaataagtggagaaaacagcttttatgttccgcagcacaaatttcaaacatgacggaacactagctgttcgagatccctctcgggaggattcagacctacaattaagaataaagccaatgtgctagcccaacggaatcaagcacaatagctgacatataaggcctaacatcaagaatcttctggcactacaccaatcccagtatagtcgcaatgtaccaaatctgatgccaaagttcgtttcgcagactcaacggatttcacagggttgacccttggaggtatttctcacgcctcatcaagtaagaagcaccacaatagcctataggagaataatataaataaatcatataaataggcccattttccaactttacaatctctcattctcctcctgcagctacaattctcaaacactgacttagcgatggaatctatgcaggtacataagcagagttcaactcgtgcgatcctgagaagacttcattatgatatcccaaccttctagactggtgtgaagcgaacattagcattcatcaaattcttatgatttttcagcatctaatgccgtttaacaaacatcctgtatcgtaaatcttcacgtgatcttactaatcgcaatctaaggctaaacatgcaaagcctagctgtgaaaaataactctcatagcatagcatctgaatgattcacaaatcaattcggaaaaattgagaaacctagctaggagaaacgtagcgaagcacctgcaattggcgatctatctgcgtggcgggatccttcatggtgtgaccatgcgtgttgaagctgagcgacgagaagaacggcacgaagaacgcttgggcgagttccggatccgaaatcctaaccgcttctctgcccccgccgacgttgaggagcgaccccatcatccagtactccacgctgtgctgcttcttcagtccccagttcaccggccacgccggccattcctcgacggtgacgggcgtctccgccgagctccggcggtcaatcatgccgacgttgaatcggcgagggagatcgtacatgaaaacccgaagaggcgggtcgggtgcacagggagcaggtgcacccgcgggtaactttaggcgagggaagaaataagatcgaatgtcgagggtacctatgaaaattgagtaagaaaggacgagcaagagcacgaaaatgaacgagagaaccacttttccatacattgcaggttcttcttcttcttcttcttcttctaaatattttggggaataatagtgagcctgattgatgcttgtacgttatcttcttcttctgctgctgctgctgcagcttctgttacgagttgctttcttagctctgcgatcagttgcggtgtccatgaatcatctatatcagccaaatgtgaaggccaagaagatgcattgcttccagagtgagcttatgtcgttttcttttctaatttctaattttaatcatctaatgggatggaaaaaaaaaatactattattttttataaaaaaataaatagtttatatattaatggtgagaatagtttttatactattatataatcacaaattttattattaaaattaataatattgaaagtataaaatattttatgctagcaacacataattctttttttaactcagaaaaaaaaacaattttttatataatcactaattaataaataaatataagtctattttattcattaaaatataacctctttattttggaggtaataaatctgcaaacattgacaaaaatttacgattgaaagaagaactttgattttcttctcattcacttgtagttgatttttgtccgcatcccttataacaattaaaaaattgcatgtgcactttggtcggtttgatttgtgaatgcagtattctttttttaaaataatatatttttgaatgtagtattcacggatcaggatctggcagatttgaccttttaaaagaaatttgcatgtgcactttcgtggttttgaatgcagtgttcacgatctgatagacttgagttgacctttaaaaattagatctagtatgttttgatacactaacattttgagttaatgctgtaaaaaaaatcttaatttgaatgagtgttctattcgggtattcggtcatccgaataaccaaatacacaccctcaattacctgaaaaagacatacttaagtaagtcgtatatccctacacaaacaaggaattcgattattcggatacttgtatatctgcaacacaaaactgatgagaaacaagctcgtatgatactcggatgcctgtaaccaggtggcgatggttggaaaaacatacccgttgacgggagcatattgtcccaacctttttggtcttaaacagataagcgaacacccttttcgataatattttttttttgttttatctcatcacaactttatttattttctaatattttttttgcatatgtgagcatgaaatatcatgctagtaagatgtctaaagagatgaacataacaattgatgggaaggaggggctagcgaaagaaaagaagaagggaccataatacaagtcgggcctcatcgacccaccttatattatactattgaatgttataagagtaatgtttaaacctattatataacctcttgtattttgcttgtaatctctttatttgcttatttgaattcaattgacattagatctcttatctatgttcataacattatcaaattgaaaagtcaaattttatcacgtgacaaccgttagttgttacatcatcatcaaaagtatcatgtaaacacaactatttgacttaatggggaaagctaacaatgagactaatttattgcattttttgcaatctcaataataattttttttcatctttcaaagacctaattgttagaacttaacaaattaaagaatgaatatgaatatttaccttcaaataatgaaattattgaatgtcgaaagaatacctatggcatggaattggaattaaccgtggttaagataacaaaattgtgagacgtggttggaattggaataatgatagtgaattagggagtttaagaaagaggaaaaaggatgtttcagttacaatatttaaatagtgacgaggaaaaagaatctaataaaatttggaaatatgcatatgataagaagagagaaagagatgtgatcatgcaaaaaagagaagaggagattttgattatctatagttttttttttaaattacatagttatcctttactctacatgaagtttaatataaagaaaattggttattttgtcaaacataaaaggtgcatggtgctaatatatacttactaatttttaagtgagtttatgttttttttttgtttttgttttttgtgaacgagaagggcaaaacgcgttccaaacgatcaattaaaacccacacgggaaaacaaccgacattacatgggccaaaacatatgtagacataaaaggtaaaacaaaatcatgaactctcatatgagtgggtctatattagcaaatcccatatataatattatatagatatattaagattttttttatatatatttgatttgattcggtctttgtttgagcccaaaatgatatggaagcaactattaacactaccatattttctattgatagtttgacactaccaacttttgtgaatctcttttttacccattcaccaaattcctacacccttctcatcccctcataatttttatcgagccaccccacccctgtcctctagcactaccacacacctccatcttcgttcagatctagcattgtcgtgcacccctacctcgcccaaacccatgttcgccaccttcactgtgccactagtccaccaccaaacctatagctactacaccatctttgctctagctttgaaccacaacaccaccacaatccaacaacgtcacgcgatcgccttacctaggacctatgatccctgcacatgcaacctcaacatccaaggcttcacatgtgtgactcccctgcaccaccgctcacatccatagttgccactaaatagccttattgttcttgtctaagaggtagtaatatttgaccatacaaaattgtgttttcgttggtggagaaaaaaatataataaaaacatgatttcattatacactatacaaaaacatgattacatcatatattttttttcaccatcacttaattcaatggaaacaagattccgttgtacaagtgaacaatgaaatcatgtttccataaaaatgacattttttcaagatttatttttaatgcacacctaggtagtgccaatagcaaatccagtattgttaactgttgctctcaaatgacattttaaaggggtattttcaggtttgaatgaaattgaccgtgggctggaatagatgttgggccttattctccaccatagttccataacgctgaattacgaactagggttttaaactcattatattatataaactccgtcaatcttactctggagttgctgacaagccaattctttgtgttggtgctaaatccctagtaagccgccatggtatgcactccacctctagtcctttcacttgcttactccaatccgtgttttcatatcatgcttaatattattgtttgcacatctgtttctgcaggtcaagtactcaagggagcctgacaatccaaccaagtgtaggcttcattaataatcacttttttgcgtttgtagaatcgacacttattattctctaaacgacggcgtttatagtctctcccaatctcagcatttttttttttatcgtttttcatatgcagcttgcaaggctagaggcgccgaccttagggttcattttaaggtactgagtcccgttacattggttttctgtttaataattttctgaaagtcgaaaagtaaatttcatttgaatagcaatgccatcaatgtataatcaattgtcgacaactcacatcaatgatatatatatatatatataaatatatatatatatatatatacatttttttttttgcatacactttgtttcttgactgagtatggtttgtctgatcaatggaaacatggatttggatttatacttaacagatcctgatgataaaagcggggcctttttatcctgtttgagcatggccctagatagcttgttttgataaatcacaaagcctggtttatagagcttttcaaataatctaaccagagtggtggcttgggaaaaaagatctagaaactgaaggttttttttcctgaagctaatccaaatgaaccttgtcacccccttccccttaactgcattaactttacttgaggctgtccattttgctctagtttaacttgatttggattgtgtgggaaaaccttttctaaataaaaaatgaagtggaataaacctgatgaaaaaagcaggggcatgttgcctgtgtgagcaggcctctcataaccttcagggatataataaccattgttattgggtgaacctctgttctctgtttgtgactgaaaggttcagtaaatgatggaacccatggtttaaaaaactgatgaaaacttattttaacaaatgaatgaagttgaataaacctgatgaaaaaagcaggggcgtgttgcctttgtgagcttgcctctcgtaaccttcagggatataataaccattgttattgggtgaacctctgttcactatttatgactgaaaggttcagtaaatgatggaacacatagtgaaatctgatgaaaaccttttttaataaaagaatgaagttgaataatcctgatgaaaaaagcaggggcatgttgcctgtgtgagcaggcctctcgtaatcttcagggatatgataaccattgttattgggtgaactgctgttccctatttatgactgaaaggttcagtaaatgatggaacacatagtgaaatctgatgaaacttttttaataaaagaatgaagttgaataatcctgatgaaaaaagcaggggcatgttgcctgtgtgagcatgcctctcgtaaccttcagggatataataatcattgttattgggtgaacctctgttctctgtttgtgacagaaaggttcagtaaatgatggaacacaatgcttttgttgcatcatgaatttgattcattctgagcttgatttttttatttcttttgatgttttgtttttaaaaacagcagaaaattgatgctttacccaatggagggaggcagtagttaatatatctttcttttttgtgaatgatgtttcattgatgctagaacaatactattgagtttattttattctgagttatatcattttcctagacacgagacattaccttttacattgtacttacagaacactagggaaactgcctttgcaatcaggaagttgcccttggttaaagctaaaaggtacttggaagacgttcttgcgcacaagcaggccattccattcagacgtttctgtcgtggtgttggaaggacagcccaagcaaagaacagacactcaaatggccaaggacggtggcctgtcaagtcagcaaaattcatccttgatttgctaaaaaatgctgagagcaatgctgaagtatgtctatatatactcttttttttccttttccatatggctattttatgatttccaaactaactgaaaattgtttcttttcaggtgaaaggtttggatgttgatgcgctttacatttctcatatccaagtcaatcaagcacagaagcaaagacgccgaacataccgagcccatggaagaatcaatcgtatgtctaaaatgtcgagatttttgttttaatggcttgttatcattttcacggttttatttatggagactgtctttgcagcttatatgtcatctccgtgccacatagagttgatattatctgaaaaagaagaacctgtgaagaaggaggtatttgattcatctagttttgttgattctcccccatttttttcaatgattcattatctaattcctattctttttttggtttgtagcccgagactaagttagcaacaagcaagaaatcccaagctcttcgaagtggcgcttcgtcttagattactaataaattgtttgaggcccaattttctagattatgtcaagtggagagttttggttgttttatttttgttatggtttgatatgattttcatactatcttcaaattaatttgagttaattgaaaaacttagtacttggtatgttttccttcggatggattacttaacattagttttaaaagaaatactaaatattagaacataaatcgatggttaagtggtactgaattattttttttctgttttctttccataattctttcgaataccttctattcaaaaaaggtaaccgaggcgcgtcttgctggttgaaaactatttttaaaccccctcttaggcctgggttgggcccaggcttttgagaatttctgtaagggtttcctttggggttaaagccctacaattcttagtttaagctttttttttaacgtcatgtaattagcttgggttgttgaagcatttctaaaaaattctaagggtattccagtaaaagtgtaaagctaataaatgatatataatggttttgtaaacgtgatattgtttagtgtttttggtgggtggtgaggaggtggcatcgtaaacagccagcacttattagctagttatcatgtttggcgtttttggtcagttttaatgtttttctttggttgatgaacaagtgctgttgttgaaaataaagatttttctttggagtaattattaaatttttagttgttatttacataaaagagagaagtataagaagtatgaaatgaaataataatagtcagagatacaaaatgttataacacgagttggtttttttctttctattattcaattgtaattgattttaattgaaatggattatgtgtaagtttttttcgaaaacaaggaattataaaaatgtaatataacattaataggattttattcatcgtaattaatttttggatgatgcaagaaaatataccatgacataagtttgttaatgtgaatttttttaaagtcagcgttaatataaaatcacccacattgggattccttcatctgatcattgtggcttgtggataaaggtgaatgatgggacttttagacaaactcctttgctattttaagttcattggtgcttggattgatcatccagagttccaaccagtcgttcgtaatgcgtgacatattggagacacttagaatgaaaatattgaaagacttactgggtcccttaggacttggaaccatgggcggacttacatgtaatgggggtggttaaattctgaaagtaaattacgaatatattcctgattttaaattttttaatatagatattcttttattttttttctgcagcaaaatatattctttttttttgcagtaaaatgttataaatagatatattttagattttatctttaattgttatctttaattgatagttattatttttagctattatctttagttatctttatctttagttgatctctttaaatagagacctcttgtattactttaattgatagttattatctataactattatctttagttattatctttggttatctttatctttagttgatctctttaaatagagacctcttgtattaatgtgacacacaattcatattctacatattcctattttcaagtcaaaacgtgttctttctccctattttcaattcatattctatatattctacatattcctttaggataaaaagatatttaggttctttttttacaaagtcaagtggtagtagtactaaacgttctcgatgtgaatcttcttcatctattgatttagttcaagataaatcaaatgagtgttcaagaaaggaaaataatttgtatgttcctgatctgggtaaaaaacttcctattacgaaggaattccaaaaaataaggcctagaaggatgacattatagttatttttatggatatgtatttgaacttttgaacattgtaattatttttctagatatgtatttgaacttttgagtgccccccttgatttattttctggatccgtccctgcttggaactgtaactgttttggtggcaatttcaagaaaatgttgttggccagacttcagggtattcagaacaacttattctctaatagtagtccaggtttgattgctttgagacaaaaactctggaatgtttatatccaaatctctaaccaggaggaactgtattggtaccaactatcttgttcgaattggctgaagttgggtgatagaaatacccggtttttttcaccaatctttctttaacaagaggagcaaaactagaactgatgcccttaaatgacgatgatattgggtctatgatgataacgatatccagaatatggttattaaccattacatcgagctttttgcctctgaaagccatgatgttatgatgctataatcagtggcagatctagaaaagtaattaagggggatactagtagtgtccacacacatttagtagcttaaagtttatggttgcataatagtttgttttccttaatatttacacaaagaagcatcaatgcaacatattgattataaactttttcaaattcaaaacattctaatccaaatacacgttattatttgtgcttagcccacgtgccatatgatttgcatttatcnnnnnnnnnnnggggggggggggggggtgctttaaacgtaggtgtgcctctacaatcattccattccttccctccgattaaggaagaggatcttttgttgataaacagtgacttctttgtttaagaaactaagcatggtttatcatcctctatattttaagtctcaatgggagtatattgggcaatctatttttgagtatattctgaaagtcaaagaagaccctaaacttatagctttagtcaacaaaaccctccccaccttggtctctaaaggagctgatccttcatatatatcgcaatttagacccattgctctttgcaatgtgatatataaaattgccaaccgtgttaacattattctcccatacgtggtagggccccttcaaaccagcttcattaagggtagaaattcggttgataacttcattattctccaagagcttgttcattcttctcaagctgaatttgcagaatgttcacttcgaaatggattccttgactgcggttaaaaagatggctagatagcttggcctaaccatttaggaaatttcatctaggatatcttgaaccaaatacaagtgctaacttcttggctggtttggcccaagggaactactatcctacacttctggattccattcctattatgttgagggttatcatcgaggagaacactaggggcctgaccctccctagaatggttgcggtgtagtcattccttttctttcccttttatccaaaaaattaaaacaacaaattcatattatgataatttcattgtttttcatcaatcgagtacatctattttctaattacatttgaagttatttatactgcaaacttgaatctagattattgggtttgatggtggagtgttaagtggaaagaatgatttaatattttagtaaaagcaataactgaattaaatatttttaatctttatctgattaataatttgtttacaatttttttgttccttttcatgttatcattaatatttttaagtattgataagaaaggtatacttaagatttaagagtttactcacgcatcttattcatttaagttaactaaatcatcttctgataagacttaaaatctaaacctttagtcaaaataaagaaaaagtaaaagaatactgaacttttttttttaaccttaaatttattatttaaaaagcaaaataaaggggttgaaatagttttgtggtataaactcgaggaggttgaattgagtacctcactttgctacactctccggcgttcaatagacttcaccatcttcctcttctgtctaccccaaaggtatcgtttcaccaccctcactttctctttcttttgattctcctcccttagcattcacacacacacacacacacacacacacgtgccaaacccattcgctcgactacgctttctgggggttttatttcactgaacatcccgatgcttatacgactcgtcgtgtttctacaattgaactttatattcactttttatcgcaattttaccttttccccaaattttaaagcataacctagaccggggctttcacacaacacaggttacggctgccccagatctgatctagaaatttatgttattacagagataatttctcaagttcttgatgttgtgggaaattttagacaaatgcggctaatgtggccgaaattgtggtcacgtcgattcctaaaaccttgatgtcgcggttcttgattttgatttttagcattgtattatatgatctcaattaacgtgtagggttgctgatgctgtgtattttccccttaattgttgttgattagattaggatggattggctagggcaaaagctggcggagcaactgatgcagataatgctgcttgcatttgctgtgattgcatttgtaggtggatatgtcatggcttctttccaaatgatgattctcatatatgctgggggtgtggttttcaccaccttgctcactgtccccaattggccccttttcaatcgccaccctcttacgtggttggatccaagtgaggtggaaaagcatcccaagccactaccatctgccaatgtaactcaaaagaagaaacctgttaagaagtaggtttttttatttttatttttttacatttttggggataatatatctttgaagtacatgatactttgacagtaatttgaagttcttaacctctttccccttcagtcgatattacagtgtacaaccatatatttactctcttttannnnnnnnnnnnttttttttttttttttttttttttttttttttttttttttttacctattttcttgattttaggcttttgattatatgataggggaagagagttctgacccttgatggtttgtggttttagttttagtgtgcaattttgatgatcaggtgattacccaaaggacaaaacttaaatgcagttctgtagtgtttttggtgttgttttctaattagaatcagagttttacctcgataatctgtttaatgaaggtttccatcaaaggtcaacatagttctgaagctccaattatgattggagaacaacaccaaaagcacttatgaaattgcatttaagttttgtcctaagccaaaccaagtgatatcataagccattcaagatataacctatctatagattcatgaatcaattttttggtcgttaggcttttgatggttgatagaccttgttgatttgtttattcagctgatgctcttcaattttaaaggaatttacacagtttgttttatgctaacttgcacttttggtcttcctactttctcaatttcatgaatttcaatcttcattttttttttccatgaatttgatcctagctattgtgcaattatgatccttatgtaaacttaacatccaatatttaaaggaaataaattgttgaaattgagataattggtgcccaaaatgcaattaagtctgttttatattgttttctaaatccattacgaggattcttctctctaactgtgtctgacttttcttttctttgattgagctacaatattggtctgtcatggtttatggatttcaaagaaattggtttcatatctcaggccaaagggtttttgtagcttaggtaatatgtaagttgcaaatttggaagcttttatttttgttgtagtcttggatgttaatgtgctcttctcttgttttgctgtcacttctgagtttttttctttctttcctcttaagtcagggacaatgttgttaaaatcgtgagaaaaatcgtataatcgcgcaccatcttgcgattttgcaggtgattctcgtgctgaatcgtgttaaagatcggagggtgttccagatcacgatctttcgcgtgagaaaaaacccattttgatctgtctcaatctttaggggttggcttgtgggccgtatttattatgggttgggtttcacttcgaaacccatattttctgactcggcccagttcacaaagcagagaaaaagaaacaccttatttcagtcattctttgcaactctcttcatcccctagggttcacctttcaagcttttcgtcctctgttcttcgttggttgttttgcccaggatcttcccttgttcttcatctgaaactgatacctccagcgccctattcttcatctcaaacttgaggatttcagttttttctctaatcttcatctgaaactgagagcttgctgggttcttcatctccctcgtttctgccttttgttccccgattcttcttgcatttcgtttttcattctccagaagttttaattctaatagtacgtgttctcgtttgtcatttttacggtttgtgttttgctgccacaaatgcacatgttaatattttttttgtctacctaaaatcacaacatcttttatcaattgtgttctgattttgacttttgtggttttgtctatcattaaaaatttaaatgtattttttttatcaagtgctcattttagtgcgaaaaataaatatacctcttgaacattttgggcctttggctgaataattaaaattttagcttgatgctaattgagaaagtgcttctctttggttctttcttggaatcttgattctcataaaaaaaaatccattttttgtaatggatctaccttaactgcttaactcgtcaattcatttgaattgtcacattattcttccacctctagtcttgatctatctttttctatttcctttttattttaatgaaaatcccctatatgatgatgatgctgaaattggattattattagggtttttatcataacatatcttcgtgatttgcatcgtgtttataaattcgatgagtatttcaaatatttcacatagaagttctcacacttgccaaaataagcaaattcaaacatgttattcagttttgtctccaaaattgaattcatgttttnnnnnnnnnnnnnnnnnnnnnnnnnnnnnnnnnnnnnnnnnnnnnnnnnnnnnnnnnnnnnnnnnnnnnnnnnnnnnnnnnnnnnnnnnnnnnnnnnnnnnnnnnnnnnnnnnnnnnnnnnnnnnnnnnnnnnnnnntcttttactgctatttcacaatcttataaacttcaattttttttaagctagcttatagctagtaattttttttattacatttctctttaatatctttaatataacttcattttttatattagtggttaaaatctctagtacctaaaatatatttttacctaaagtatataatttatgtgaaaaactttagaaacatgtttcttttgttatttcatactttcagctatttaatagttaactttgtcgaacatttctaattaaataatttaacttatcaagtttttaattagtttatgtcaactagttttgttgaatgtaataacaatatttttcatttttaatcctacaaatataagaaattttgttttaaactcttgcaattacattcacgtaaattatagcagtttttttttttttaatccgtgtcatctctatgaggaccaaataagtgatgacaaatattataggataaaaactaaaataaaatttacaaagatgcaaaaagtcatcatttttgcagcaacgtaaaatatattgatgaagtcatttcttgaattaagtatatgtttagtaaaacaattataatcatttagcaatattaataaatatcttggcaatagctaacctaaatgtttaatacttgacacttggtgacaaaaataatttttttggatgatttaagtcatgggttctcttaaatactgtcacggtgggtttgcatggagcatcatgcactcacgcaattgacaacgttctaagaacaaacataaggcaaattaggatgatataaaggtacacgttcattttaattttcctctctcaatatatttcgttcattcattagaatgtcaagaatccttgaaagtgaccacatcaaaccttaattcaaaggatttggctgaagattagctactccggtgtgtgtgtgtatatatatattactcccttcaacagatggagaacatgtactaaatttagtgtgaagcgcaacatttgattgaaagtagtcgttttcattgtaaggatgtctttacataaaaatatatatttcattttttcttacatctttttaaattaactaaacaaagattttttttttcttcatttttttagtcaaaacaactgaaaagtattttttttctctttccttcaactttttcccatactgttcctttcctcatttttttagttatatctagattgatgagagaaaattaaataaagagacgaatattatgttctactatttaaattataaaacgaggatggaatataatatatagaatgagaactttatcaccttggaatattacggtttggttggagtcccttcttcagtccaattggaggttggcatcctcctcaatatcgttgtaaggatgagttattttgtattgaaaactatgtgatcagttttattaggagacaaaccaattgggtggctcgtcaccttgctaaagcaactcaattccatgttagccaccaaatttatgaatagattcccacttgtattgtatcatacattatcaatgaaatgacttaaatttcttttaaaaaatgagaactttattctattttagtttttccacaatatatctaaataatgaaatataatgaatttgattctattatactacaaacatagcctcatttcaaaacatggcacaaaactctccgttccagacatatctgaagcagatatgccccaagaattctagagattgagacaacaccaagaattctgcatcaacaaacgtagttgtaaatagtctgattcacgagagaatagttgatgtttattggacaccagagtgttcaacgtccggttcaccacacacatgtacatgcaacaatattatcatagtaacttcaaagttgaaccacacttttgaattatagcaaataatgatgtagcaatcaacgcatgctgcaatccaaattcaacacatcattaattggaatctcaaaatctgtggtgatctatgcatactccatcaatagaatcaactattggcctaagtttcacaaagatttcacacttcgctgactaaaagtgggaatataattctgattctttgagcgactggttttatttaatcggcgagtcgtaatagaaaaagaaccaaaatcatagattctagtgggacaacgaaacatacccagaacaggttcatttctagggaaaaaaattgtcataatctactctggttttatttaaggaaagagtaatccttgtccacttgtaattattagtatatgttcgcttacaggaaagagtcaatttttttaatttataaaaaatatcatttcaatctttaaaattatgtacacacaaaaattctttaaattattaaataaaggttattttagtctttgcatataaaatatttgcttctctaaacacatgcaccaaatgaatgtctcaatccttttctcaccaagactgaataatgaattgcactgacgacaataggcattttaacattttaaaaaatgaaaaaaaaatatttttatgacataagaaggaattgattagattaagaaaatccggtacaataaattaataactatgcccccgaagcatgcacatcacttgatttctaatcatatatatgtagaatataagtagaaaattttgactagagagataaaacttatctcaataatttttactcctcgaaattattaattaactttcagttgacagatatatcttagttaaaaaatcagggcagggatcggttatcatttgtcatcatgcaattgtgttgctttcttaattagcagtcaagatatttcattccaaggagttaattagctaaaaattccaaaaccgatccataaaaataaataactagaaaactaatgtcaactatcctgaatttttataggttctttcaatttttactttatatatgatatgatatgatattcctttcggaccaaatcgcgagaagaattggttattgcgtcacttggactttagcatttattaagccaactgtcgctcttttacagcataaatcaaggacgtttataggtttgaattaattccatgaatttagcaaatcaaccaaaacatttcagactttcagttgtgtcggtttgacttatgtgtacactttgcactaaattaaactaatgaaacttaatatcaagtatatacatagcagtgatcaagttaatgtaacattaacttttttttagttacttttattttcactattgttttttaaagatctggtacttctaatgaataacttatcctaactatttcctaaaaaaataaaactaatcctaactattggaagaaaaaaaataattctannnnnnnnnnnnnnnnnnnnnnnnnnnnnnnnnnnnnnnnnnnnnnnnnnnnnnnnnnnnnnnnnnnnnnnnnnnnnnnnctatgcttaatgtactctttttagcttaaaagttaatctaaagttaaagttaaaaataaaaaactttaaaatactgttagactcaaatacaactaaattttaattacttgatattatttaatgttataatctaaaaaatatattttaattaattaaagttctagtccaataattattttttatttttaatattaagtttcaatggagaacaccttagaaaaaacatatatatattttttaaatatgaccacaagaattaaatgacattaactagctttcttaattaatgtagttttagataaaatttaagatctggcgtctgagactaattttaagaattcagaaattataagaatttagtaaggattaaaattatgcaatatggcattatatataaattaaaatatatgataacacaaataacaatcaagctaattttttttttggtacaggtcaattttcaattattgagtgttatttggtatggaacaaatttgcacaacttttctttccactaataaaataaaaagatcacggaaattagaggaggtaaagacagaaggaaacaaaactccaatcaaaagcgttattatgtgaaaacaacgaattgatcattttcctatcaatggcattattctcattaaatttatgcaagaaaaatcgttctgtgaaaattacgaattgatcattttcctaccattagcattattcttattaattttaataaagtaaaaaaatctggctcgtacaagaccacaaatgtcaacaataagaggaaaaagtcgagaaagaagatagggcacattgcatatccaccaatggctcattacaacatgactagatcaataagtggttcttgattatcattgatggagatggaataaaaagtaatggtgcttgcttgaaaaggaaaatatttgtgctgtagatagatacaatattctattaaccaaaaataaaaaaatacaatattctgcaagataatcagtaagttattattgagacaataggctaaacaaaaaaaatttccgacttacgctagtgcatgtaaaaaaaataaaaatatttatcacttaaactaatcaatgatcatgcaccatgattttgacaagagttgttattgtatgatattattaacaaaaatcgtacacgaattattaatgtcatgacttaattataaaataatctattagtatgaaaataaaatataataaatatattttaagataaccacaaaccataattgatgtggctcaagtgactttgaatacagcaaaaattatatatgcacatttgataatatatccattaaattaaaaaaaaatgtagtttggaaatatgaaatttatttatatgcactataatatcaaacttatttacacaaacatttaataggatttatcttatcgttactttatgttaatgaataagatgtcgtgataaaataatcaaatcctattgcatgtatgtaaaagaaggttttacattaacactgcaaataaattaaattattagaatatcccttttaacattcataaaaagtttaataatctttagattattaagtgcatntatatatatatatatatatatatatatatatataaacctttttattgttatcttgttaacttttttcatcaatagaaaattcacaatagactttatgaaaagaaatataatatattgtatacttcaattttcaacaggttaaactgagttgatgagacatttttttttcaatctttaaatagatctaacatactattcaaacaaatcataattcataacctataatgagaaaaattatcttaacagaggtgcatactgtcatcatgttaagaaattccaattgcaaactcttgctgtttactttatcaacaaaacaagtcctgccgtggtgagattgtgtcagtgttatccgaatatcttgtctccaaccgttttggtacctaaataaatcctataaattccactttgcttcttacagcgccaccaacaactccaataactctatattgactacacaaactacccttctctcatttcttttttcctttcaacctcattattattcttgtaagttcctctttctttttataattcacaattcatgtttagttctcttattattccaattcctgtttttttacttgctacagatctaccaagtgctattttgaatccgatttgtttacacactcttattgtttgtctcttgctttattatatctacacatttgattcttgtttcctgtactgtatgtactctttgtcaagttaattggttgtcttaaaattgtttgtcctctcttcagaaccaaaggacaatgctaaaaacgtgtgttcgtgttttctgaaacctcagcttcgatttggattccttttttttttatttttttatttctcattgatctcagtgttctcaacagctgaggtttatttacacttgcaaatttattaagatcctgtgataaagtctcatttataaatacataagaaaataaaagctctttttattaactagtgatctcgaatttgtagtcttttaattgcagctaagagtgtcctgggtttattcaataagtggtctcaaatttgtattgaggataaacaactatgttaaggagagttttgttattcataatagtcttattatgtttggcttaaatagtattatctcctcgtgcttcgaggaggatactgttaggcataccaataaaatcaatatgaatctcttgtaatgaaaggttctttcttttggattggtggattttgatgtgttttttccttcttttttttaaaaaaaaaaaaaactcttgttagcttcatttctttataaacgcatctagtggctacttttgctccgggtttttgtgcaagaggacaattgataccttgtaggtttcaattgagtggttttaatatgacttcatctatgtctggatttaattcaataggggcaaaggtttatttatttatttaaaacatttctcacttagttcttttctgtagtttcttacttgctttgttttagatcacaatcttttgtggaatttctggaaaaactggaaggtggagttttgttagatggtagttccttgctatatttttagattatagtgcttacaaacatttagtatgctttcatgtccaagtgatatctgtaaaaggaatagtgatttgtttttgttaacccagcagattgaacatttttcaattgaagtctcgttccccaattgaataatcaatttttctaaatactgtgctacttttttccctctccagtttgattcattcagctgatatggagttaaagaaaatgaaagttacaggtggctaaggcttggcaagttctatggcctactctggtatgactttacattttttgctaatgaatattttggtaaatttttatttttaattttaataacttttttccttaatttatagatacttgggcaatgtgcgagggaaaatacaactctggaagcttaagatataatttgcggaaaggcagtaggagggattattgtaggagcataacttctgttatggaatttgaatcagattggataaagcacagaaagtcatcttcttataccgctcatgttattcgttctgcgacatctgttataccttggtcttgtagaaacccaattggtgaagggtatcatgaatttctttaattagttgtactcactactctgtaagacattttcacattgtttggttgattggtcgtgacttgccaacgaaatttctgtacatcttcgttgcacatcatatatgtgattgcgaatttgaaaaatacctggttttgtggctgaaaagaagagattcacagagccaaatatgtgttttaccaatttggccaaccatgataaaccaactcttacaaaaaacactcattgcttgaggtccgagtttctggatgatgatgatggtagtagccccatcctacctgggctgcctgatgatgtttcaaagcaatgccttgcactcgtgcctcgttcgaacttcccggccatgggtggtgtctgtaagagatggaggtgctttattcgaagcaaagaatttataaccgtgcggaagttggctgggatgcatgaggaatggctctatatcttgacagcaggtagtgaaggaaaagggagccattgggaggtcatggattgcctcggtcataatcgtcgatctcttccaccaatgcctggtccggcaaaggctggctttgggctagtggttcttaatggaaagctccttgttatggctggttattcatcaattgatggaactgcatctgtctcagcagaggtttaccaatatgattcttgccttaacaggtatgcttttcggctgtaaatttacctggatgccttaggaacttattacacttgatatgataattcctgctatataatggagttaatggaggatcatttttttcctgtatatttttgtatgggaaaaaatgatcctgctgccggttctcttgtttattatactttatccatttctgggatgtgttgattttagaaattaggactgaggtgcctgtatgtctatgcttagaagtctttctggtaaaaggttttaacttttctgacatgtgtttttttctccatctgtttcactcaaaacagtagaaagtgggaaataaagactataaagcttggatggaatggcttgacacaaattgactcttttattgtatgattttaatttcccagttatgtaaatgttaaaatggttttcaagaataaaaaaatcattgtcaacgttgttacatgaattctaaaacatgaagtatgcttgatcatacatcagcctcacttttatggtgtgctttacacctgtatttatttgcttacgctccttcttgtataaatcactgtgtaattgataaagttgcatcactttctctatgatgaccttttattattgatctagctatatattctgagttaccatgacatgtcacctttattgcaaggaaccatcttagcacagtgctattattaaactttgtaattgcaattgcagctggagcagattgtcaagcatgaatgtggctcggtatgactttgcttgtgctgaagttaatggcttggtttatgcagttggaggctgcagcacaactggtgacagcctctccagtgcagagatgtatgatccggataccgacaagtggacgccgatagagagccttcgcccgagatggggttgctttgcctgtggatttgaggggaagctctatgtcatgggtggaaggtcaagcttcacaattggaaactccaagtttgttgatgtctacaaccctgagaagcacgggtggtgtgagatgaaaaatgggtgtgtgatggtcactgctcatgcagtgctagaaaagaagttgttctgtatggagtggaagaaccagcggaagttagcaatattcaatccagaggacaattcatggaaaatggtaccggtccctttgacagggagttcaagcataggttttcggttcgggctattagatggtaagttgttgctgttctcactggaggaagagcattcttataagactttgttgtatgatccaaatgcagcaccaggatctgagtggcagacttctgatataaggccatctggtttgtgcttatgcagtgtaactattaaggcctgaaaagttggctgcttccgaatttagaaaccttgagagagctaaggattttgttgttttactaggattttgaatagtagttagtaattttgaacgtgactcgatgttaatttagtgtttttgcttgttcttgttagttttatcatgtcatgtcatgtctctgatttatggttggattatttctacaattattcatgtaaccatcgattttgaccaagcactacaaattatggtgggcgagtttctttttctttttcatcttccttattttgtgttctcttggtaatattagaaagtgctaattggtaaggttggtaggataactttgacaaataaatgtgtccattttaagtaggtggtcagagttcaattttctgactcgtatttatggaaaaagtatttgatggaaaaagttattattttttatttaacttccattcctttgcaaggaaaaaaaacaatcatgtaatatattttttttaatcaaaacgcactcacaaagtttgaaaattgtatattattcaagacttaaatgtgtatctaatctatgttagtttattttaaaaaataattatttattaattttatgaaagatttttgaaaaaaataatgggtagatgatttataatccctttgtaaatccttgttcttgaataaggagagcttaccctcattcaaaacttttatgttccaaaaaacacttatataattgatatttgtagaaaatggatgttcatctggcccgtatctatagttttttttcttctaataaataatattgacaaatctgtgtacatcatgagtattgatactgagcacttgatttaatagatgaaagttgcttgcttgatataccttggtaagaattgcacatgatttatattaagggaaatgacagagttttgaaatgtagaagaaaaatggtaatgaacagtatgaatctttcacaaaagaaaatgatcatgggaaagttataacttataatggaggactgagcagatctgtcgatatgcttttgtgatatttaagataatataaggcgggctaggtgctgttacgaaaattacttttcctaatgaagtaactttggatgatagtcacttacactgatatttaatattttgttgatctgctgtatccagtagtaaaaaatatttgattagaagaaaaaaaaaatgatatagaaaattcttgaaatgcgataaacaatgaaatccttgaggaggtgcaaattttgaattcagcaactcttaattcttgacataatgtaatccatgaggaggtgaacattatgattgcagaacactttctcctagtactaccggtaccagaaatacgagaacattctcttacactcttacttacaatgaggtcatttagtgagcaacaagaaatagcttagcagcccgagaagtattgaagtgttacactaccttgattcttgctgctctcttgagcatgtattagaatttgttgctgaaagagtagaagacttcttgggatgtattaaaaaaaatggacgtaatgaatatgaatatattttatttatattctctttcaacgatgtagtattatttaattttttgttaaaacataattatataactcaaaacaaaaaaagagagaagaaagtaataaaaaatatcaacacatgttatactaatctaacaaataaaaggtatttcaatttaatataagagacaataaaaatatacattattaaaaaggattatgacttaagttttgaatccacaattgtcgatcaaaatacatagttaacattataaaaaaattaataattaatatttgtcgataaaaaaattgacaacccacattttgtagaataatacttaaaacaagtattaacataaatgcataaaacttaacaaaatacaattattattattacatttaaatatatatatatatatatattatataaagtttaattacttatttgattcttatagttatataaattttaacttagtttttatacttaaaaaccatctcttttaatccttatgttagttttcattatgagtttaaacggtagggattaaaaggaatataaaatgatcagattaaaaaggattaaaaataatatgtgtaaggattaaaatacatgatttaaagtgtaagaattaaggtaaaattttgtataattataaaaatcaaatgagtaattaaactttaatataatactattatatgaaaaattttgtttttaagaaaaattttgagggccaattatctatgcctatataatggatatatgtctattaaaaaaaattagagggactctcttcgtcctcaaataacttaagtaaaaattatgtcagttgtatatgcataatcaactattacgtaagtaggagataataggttgatttggtggtgaaggagaaaagaaaaggagatagattgtaggtttgaatttctcactaacaaaaattaataaattatcgactaatatttgttgataaataaaaaactcttaataagtaagcaacaaatcacgtagatatacagttcttgtttgagttgggactattacatttatattctcaattcctcgcgcgaattgtttgggttagggctactaaatttatattcttaatttcctgcgtgaatattggcaagaattgattaaaattttagcatggactcatcaacacacacctttgtctaatttgattcaatggaaagataaatcagtgactctttccgtaatgcaaccaagattgattggactagtcaactttttcataagttatattttacttatggagtgttcttaattttctcggcaaatttagttaaataactttaacgaaagtcttttaattcaagacttttttggaaatttaatactttcaaatacatccagtaatcgcgaattaagctttcaagtaacaaaatagttatttagcctttatctgttcttcctatccctgttatttttggagtgaacgagtatctaaaagaaaaaaaagtaaatagtatttaagatttgaagttacgtgaaggtgacctcctgcccaaaggtgactaaacatggcaataggtactcagtaggcccataacccataaatgcaatcattttcaagcccaaataaaaccaacaatccaaatcaaattatcataatgcttgcacgccaaaatcaggaaatttcagtgcgtcaattcactcaccaaaaactctgaccagcagcagtcgttaaaacaaaataatatttttgttcgttcctcttagccgctattgccttcaattcaaccatttgcatcataggcacacactggaccgaacaaaaaccatttgatcaatttatataaattataagttaaactaaacttaacacttaccaacagaaacaacaaacacaattcagcttctcctcctaggaaacgctgctgacatggctttcgggtcttccgaggatgtctcaggagtcaaattgcttttccttctggcggtcatgtacggactcttgtcggcgctgacatactccgtcatccacatgaagttcgtgaaccctctcgggaacgacgcgccgctcgatcgattctccgaagccagaaccgtacaacacgttcgaatgttgtcgcaagagatcgacggtcgtcaagtgagccatttttttgttttttaatttcgaaatgtgaaacttgatcatggtatttgcgtttttaattgtatattgtttacagttagggatcttaactgtgtgacatgatgatgtcaatcgctttcgaacaggtggaatctgatagcgcttttttcatcgccatcggtgttatgaactgagaaatgttattcgtacaataacttttaaatattttatatagcaattttaagtagaagaaaaaatagaacatacatgacactgtaaatccaattacaaactagtatcaaatatggtaagtttactgataactaatttaaaatagttgtcagtgtaaaaacttttagtctaacagtatatactcgttaaactcttatttttatctcttttgtcacattatttgttacatctcatatttctctcttaatcacagataatatttctcttatgaatctggcatgcttttgtgaattgacttatggtgcatttattattaggaagggcgtcctggattgaaacaggcagcaaaatatattaagggtcagttggaagtaataaaggagcgagctagctccactgtcaggttgcaatactttattattattattattattatttgtcacacacttctttttctcatttgcctttttggcccacttatttatttaacacactttttagtgtatgtttattatttttttttctttctcggagtctgattttattttatttccaatattttacttgcagaattgagattgaggagacaactgtgagtggctccttcaatatgttgtttttgggccataacatagctctgggatacagaaatcacactaatattcttatgaggtaccttggctgttcaatataatcatttgtattagattcagttatgttattaggatttataaataatattcttcagcaatagattacaccctatacttaagcaattttcacatttcatacatgaacttccttgttttaagcctgtagtttgtccattgcttactttttaaggaaaatatcaccactaaagatgcaaacttaatatatgttagggcaatgtattccataattcaagtattatctgaattcaacccatagttgataggtcaccagtcaccactttgttatccaaactgaccaacaaagtgatacatttgctaggattcaactactgaattgagtataaaccagacataaaataaaggtatggatgccttgtcaaagaccaatgcatgcaactaaatgtccacaatataggaagggcattctggagtggccagaactcatgctagaattgcagcataatttcattggaaagggataaggaaagatgttccgcaatttgtaagcaaatgtttcacataccagcaagctaaatttagtaacatgaaagcaataatgtaatttcaaccttttccaatatccaattacatgtagaggacatagaggcatggatttttaactggcctacaactatcagtctaacactacactaggatgcactgtcctgttaatatttatcgatcatttgtctaagtaaggccactttgcagtcagaataactaactattcaagtttgccaattgcagaacagttcattcacaatgggcagtttattgaatcattttctttctggttgtggcttattaaacattaaagatattgctgtgttttttacttgtaccacactcagtgctatcttactctgttttttctcacaccagtttaaatttttctatggaatttatgcatattcctccagcaaattcaaagttgtattagtatcattctgtttcccttcttacatttactcccacccttcctcttattttcagttccctgctgtgatgttaatttctagcaaagaaagacataattaggaacaccatacttgaagtgtgtttagctcacatgcactacatgtgttataaattataactggcattaatcatgaaccaaagttaagggttaagtgacacagagaattgaaagggctatttgagaagggtgaaactacatgggagataaagtgtaattatccctttgtttgaattacatccctgaaagttggttaacattgaaactgttaacaagtgtttggttttttaggtgggatttcatgtgaccctttttttaactgttttgtcataatgttgaaaaaaatacctcataattataaattagaagtgttaagatgtctcacactgactaggaataaggctagaatacttcttataaggcttgggcaatcctcacccttgagttggtttttggtgtgagcagagttgtcaatagcagtgtagcggccaagggctgcaataagcactgccaaagcatcacacttcaaaatttttaaaatagcagtcatcccactatgcgctatactgctatcgtgttcttaagttcagccgctgcatgctgctatctttgacccgtaacaatggatttgagttaacatgtcctgctacattagctagtaatatgggcagaatactccttataatgcataagcaatcttctccccttgacttaggttttggggttgagttaggcctagttcatttctaataagaagtaataggatccaacaaggtaaaagagggtgagaaaaaaaggtattagataagcttgcttctataatctgagataatcctatcaatggggtcacttgctagtaacttacaataacactgtaagaatcatacagttatctaatagttttaaatataaacaatgttcagagggttaattgaaaagaaaacagagctttataaatgtaatgcaaaatttgaatgaagttcatggggtggtggtaatctggatttacccttcttgcaataaacaatgttattttgatgcaatctctctctgtctgtttactttttttaaaaaaaaaattgttgcaaatgatatttgtcctaacacgcgcacacgtcgcccagaaaagtgatatataccatttcttaactttagagtgggagtgaacataaggtgggaactaacatgacactcttaatataaattaagaaggctccttgaagaagggttttgcaaagactgataaaaaattgtgttctcattagtagataatgatatgcaatctaaaggtctttgaaatatggacatttggatataatgatttgttattgaacatattatgtcaaaagtcaagactatagtgaatcattattgtaccttgagtggctacacatattttctgtacatcatgtaaacaacaaagtttgacatatctgtcttagtttaaggaatgttgactgcatttcatttttattttactataggatatcatctgtggattccaaagagactgatgcatccgttttagtgaatgggcattttgatagtccccttggttcccctggtgctggtgactgtggttcatgtgttggtgagtagtggctacatttgatgtcgtctttgaatttaagagattattatatttgggaaatctaccttgtcaccttgagcattctaaatcttattgttcatctgatttccccacttttcagcatctatgctggaaattgcaagactaattgtcgactctggttgggctccctaccgcccggttattttcctttttaatggtgctgaggaactttttatgttggtaggatgttgtctgtggaagatgaatggttattcatgaatggattttaccatgatgaaactaatgaggtattgtttgcttttgatgcttaagggttcacatggattcatgaagctgcacaaatggcatgacactataggagcttttataaatgtggaggcatctgggactggagggcctggtaaatgtgaagcaaaatttctattattagtagtaggataataagctaatcttcaatatctcagtccatcaccttatgatgtgtgctatacaggacattttcactgaataatgttgctaaaattaacagatttagtttgccaatctggacccagttcttggccttctaatgtctatgcagaagcagcaatataccctatggctaatagtgcagcccaggttttgtttctcttttaacctccctatatctataatactctactgtgttgcttagccattgttttccccttttgtatttactaattcaaacatgaattttctaatttaacatacaggatgtttttcctgttattcctggagatacagattaccgaatattttcccaagactatgggaatattcctgggcttgacattatctttctacttggtggttatttttaccatacctcctctgatacagtagagagactattgtatgtatcctatgtgcttggtttggtacaagatatttgattgaaattgcaaatgtgtttgatgtattactctgtctcagacctggaagcatccaagcacgtggagagaatttgttcagcataatcaagacttttactaattctgctaagctacaaaacacctataaaacaaattctagtgaagttacagctagcacattcaacgatgagcgggctgtattttttgattatttctcatggtttatggtatgcactgaagttggtagattcctgcttttgctaatgatctgatactcctagcaatatgatcttcataattgggccatctttctctttgttgtcttatatataaattatggattttcagatattttatcctagatgggtagctaaaattcttcacagtattcctgtcttcttctttcttgttatgcccttcatgcatggtaggtcacattcttggtcagcagcattgtgtgattttataaaaggtaaattagtacatgcttactttcatttacttctttgtaagatgtttctaattgatctccttgttaatcactttaattttttcccataatctccataatctatattctaggagatttttttggcgagttatcctagaataatttaaatattatttgtagacactttgaataatattttgtaatttgttggacttgcaggatttttgttccatgctgttgggattatattggccgttgttgttcctgttgcattttctatgctgagattactgttttcttctcagacaatgaattggtatgttcatttaacgttaactttaggcttcttgtagttagtgacagatttttttcttgtttaactttggtttcttgtagttagtgccagaatttttctttcttaatcaaattatacagtgggagaacaaagtatgataagtgccttttttttgtggccattgaagtatctgaggtgtaataatttaaaaatcttaatgcattttctgtgatcatgtgttaacataattgatgaaacccaggtttgctcatccatactttgctttcgcgatgtttataccttgtgcacttgttggacttttaattccaagaattatctggagaaactttcctctttctcaagatatttccattgtcaagacatcgaaagaggtattgcagcacatattgaaatgggtttaacaagtctattgtgatccatgtttcatagttttttttttttttttgatgaaatgattcattaataaacatttactttattgtttgggtctcaagctttacttagcaaatcttaagttgcttttgaagagtacgagttttatatcttggttcttctagttatcaaatgaaatttattgtccgatagaaaggcttaaaacttccaacaagcagtgtctacaaaatcagcatacctactttggcttgtgctgccttcatgcgtgatctttataaatatgattgtgtggtcttgtgaatttgaacatattcttcatgagtgattccattttgttacgagtctgaacttactttttgatttgacacataattgccaggcgctatctgatgaagcaaggttctggggagcatttgggttctatgccgtattaactttggtgtgcagatttaataaatagtcatgcaccaacacacatgcacatacacatatatatacacacacagcatgatttaatgtattctctttaatacttttgtgtggctaaacaactttagtaaaagcaggcttatcttgtagctgggttgagtggaggctttgtgactttttttgtgtgtgcttccctgcttcctgcatggatatccttctgcttgtcagtcaaatactttggacaacagtcactcaggttggttgtgaattcttatgtaattgtaatcattgtatttactattttcgtacaaataattgtgtgtcttgcttcatcttcggtcgtactgccactaatgtcattgactcccttcacattatgatagatttgtcttgcgtgtttgctgtttttatatgcacgctattatttaatctattttcattttgcatctgctattcatctccataattttttttttactctccaggtcaacaatgttttacatactacctctagttccatgccttgcgtattctgtttattttggtggctttcttacccagtttctgatagagaagatgggaatgatgggttctcttccactaccatatggttagtttatatatacacactccagtaattaaatatatgcatagtagattggccagtaattaaattaacttataatagagtggtttttaaggcctgggatgataactggaccattgtgatggaatcactaagctttatgctactgcatttgaataagtacatttataagtttatttatttaaaatcaaatgaaatgtatgtatgggattatctcgcttgaggtttcctttattgtaactcatcactttgtatcatgctagcaatttcataatggtcaaaatgcttgtggctgaccataacttcttcttgcagggcactatgttcccgatgttattgtggctgcattaattggaattgtaactggttggtgcacaggccctctaatgcccatatgtgggcattggttagccaggtcatccatcttgcaatttctgctacatcttagtgtgtttgctttggcattatcatctcagttctttccttacactatgtctgcacccaagaggattgtttttcagcatactttcctaactgcaggtattgattatcagaaatggcagtatggtggcaattataattttcttgatactctctgaagtaatcaattaatctagtgtctataattgcttatataagatcctcttatttgttttcttttccattatcattgtagtaccccaaatatcacctttttccccctctttgatctaatttctaacatttttcctatggtttggcaggctcaagtcagattatggaatccacttatgatttttctgtaactgactccaattctttactattccttttcaaacattcacctagagtggcaaaggaattgaatattacttcagagttttcatttgaatccacatcattgtctaaacgcaatgattggatggtaagttgcatgctgatataactatatgaatctttttctcacaggcagtttttcatctcactcaaataaaatgggaaagagtgaaataatatttttgtccacgtttattggttgttctttaattaatgaagttcaaggttgagtcagactcttcagtagttgcaaaatttcaagttggtgatctagctggtctgtttatttgttcagtagttgccatatttgtttatattacatgtattaaccacttttagatatactgttgttatcatataaattcattagtacaaaaacaactgttttttttttatatatttaagcttgtgatttcatgaaattaactttctctttgcaggcaatttttccagtttcttttctcttctcaaatagtctcaagttccctgcaaaaagggatgatattttgaaacagtatgaattctttcccaaattgtctgttcaaaatccatctttaaatcccgaaaagggacccagaagagttcacttggagctttatttagggtgagtggatcatggtaccagcatagttaatttacagagttaaaaatgcatggtgtgatttcttgtttttaataccttggcctagtgtggaaatcttgattatactaattgtttagttgcataaaacctttttccatgttggtatcatactataacagtcaaggcgtgagaattagtgcaggggtcacaaattgtgatggtagttggactagtagtctaatttttttcaacttggttgatcttgtctccataaagtattttattatttcaatcattgtgaatttttgtctataaaaaaataactttcatctgacagtttttagctgcaatttgttttcgttggtctgaaatctgtttgacaccaaggtggtgatctgaaaaaagttgaaagaaaatgaaatcttaaaatacctaactttttactttgttttcatgtacaattattttcatttcagttccttggaagaggtttgggttgcggttctcaacatcactggtcctttatcaagttggtcatttgcagataatttgcttccaggtatgaaaattgtttcctccacttagttaggcgcaaactcaattctaagatagtattaaaatctatcccagtggttattggtggtcctatgagacctgttattgaatcattatcagatcacctacaaatatttaatcttacaaacttcatacttcagatgtctaattctcagcatgaggagggtatattggaaatcccatattgactagtatgtggccaaaatagtgtatataacttaccttataaattagcttttggggttttgttaagctgactcagatgtctaatcctcgacatgagtaggttaggttgaaaatcccatattaactagtgatgtagtcaaaatagtgtatcattgtatataacttatctcatgagttagcattttgggttgagttaagttaaactcaaaattctaaggggggtgattaaatgttttcattgcctaatgtagcctgcatttgcacaggaaccgaaacctatggtggtggtccacaatcatatatatgtcgtctcagtggacctagcgatgggaattggaccttctggttagaggtaaaatttgatgctgtattaaacttctctttactataacagcgtaattttattttgtttgataatgtcaggctaacagctctgaagcattaagagtggacctagcggttttagaccaaaagttggttgatccagtaaagagattgaagaatctttttccagactgggttgatgttgttgcatattctagttttatgtctagctatatcttctaattctttatgtaaacatttttagaagaaagagcaaacatggcatttatagatgcaaaaccaaaaccaaaatttgatactagatctggactgtcacaaatacgtctttcctgaatttggcttttttggggggaaaaaattaggagaagctatccctattacaggctgcagaatgcaaagtcatagggaatgcttatagtttatcaagaataaaataaaaataatttttttgctgaagcttaagagttaaaccaatgggttgcaaccgaaatgctcttttggtgctgaacaataattgaaaatcaatgtttcgaaattcatccattcccaattaacgacagtcaagcttcctggtacgtaagaaggcttaacttctaaattaatctcttttgtctgcgtttgttcatcttaagtttgattcgttgtgagttctgcagcatttgttgttcagtgtaacagaacctctttattagttataaacttcatcgttgaagattggtggtttggcctcattcaaaacttttacgtagccgaaaacaattgtattaatagatattttgcagaaaatggatgttcattaggcctatatctttttcattttgttttacttttaaataatattgaaatctcatgcaaatcatgagcatttatagtaaggcaaaggactcagtttttaaacaaataaatggaaagtattgatctttgacaaaagaaaatgataatgggaagttacaatggactattgagcagatatgtcgattttgtaatatttaggataagttaaggggagctaggtgcaattacgaaaattaaatttcagatgaagtttaatttgggtgatagtccggcttttacacttggacaccctatatactctttttttccgggaatatatttatggactagcttgtggtcatgggtccatttttgtagaaaatgtcggttataataataaatttagtttactatttaatattttgttgatctgtatccactagtcaatatttgattaaacaacaacgttacatgcactcttactgcgttggtattcatggacgaaaaatgagaaggaagcaaggaatgtttttcgcaaatagactctccaccaagctgtgtttatcctaaatatttccatatgcttctgccatgattaatactacaagcgttgtccaaccagtaaatggatgtgccccttttcccttacccttcgtctgttcgtactgttcccacaaaaatcccgtatgttgataattgcgcactatatttctgcagtaaagagaaaatatattatctaaaaaaacaaccaataactttaaacaggatttcaatcgaactgaatacagtcgacaatacctaattaaattgcttctcaattcttcgtagatggttttagctttctcttgatatggcccattctctacaagattcaacccaaagattagtttcaggaagaggaaggtataaaatatagtgggaatattagcagatattttgccttggccagtccatattacctttggagtaatggtggagcgctgaaagaattctgtaattcatgtttatccaaattggacctctccagtatggagggtcatgctctgtgttgtgtttcatgtacaaggaactgtgtaataagaaatattatttttggttcactataatcaacatatgctgaataatgtcgttcaattatatccattaaaaaatgcattagagcatagggtgcaccttgttttggcaagagaacgtaatccatagttggtccataagaggctgcgatttgaaatgagttcaagctgcttttccagaatccgtgatccctgaatgaaacagaaaataaacatctatgaactgaaatcattcaagcaacgaataaattcttagttcattgcataaaaagacatgttaatgagaattaatgcacatcacttacagatggaatgatcctccccatgaacgggaataaactaacataaccaatgtgaggaaccaatctcaatacaggcatatccataacattccggagaagttggcgagtagcataattttgtgctgcctcaggttctttccatttaagttgaacctatcatggttatgtaaagaaaatctcattcttggtcatgaatagggaacccatgtattggtaatcttgcaacagtatgcataaataatactaaatacaaataactatatactctaccttctctgtatgatttccaaaatcaaagtaagcaccatatgcatcatcaaaatgcatctgtatggacatcaagaacaaattaggcatacacactattattgtagcaaataactattaaaagtcaactgcatagtttgctttcaattttctttttattaaaaatcatttaaaaacaaaaggaaacttagattatcattattttctccatgtcaaacaccatatgttatccatgataaacacatagaatcttccatggaacaattgctgccaatagataggaaaaatagttggaaatttcaattgtcaagagaaaacttgaaaaaaagattccatgttaatgcagtgtgttcataatcaaaggtttttatatataaaagatgttcacattcttcaataattccataataataaacttggagaaggcctagatgagtatcccccacaaggatgagcctcattttctatgaaaagtcaagaaaaaagaaaaacccaggaatgtgtgaaagttttctaaatataaaaagttttctttcccataaaacagtaatttgttttccatgtttaaaattcaacttatctataactgtatgtgctaagaaagttttcttttctcttaattccccctttttatttctctcctctttatcttcactattttgctcctgttccagtgctgcatcaccaagcagggatgcaccaccaccacaattacaaggtgtgcaacagctctaaataaagggagatgaggagcaaaggtgcaatacctggttcagtaactcaaaatccaatagcaatttagcagtagaaccataatcctgcattatttcattcaatatgtcaattaaataaggggattaatctgctgccaacaattaccgtactagtaatttatttttcaaattataccatgccaggtttgatttccatatccaacaactcttgaatggaatgcatacagtctgctgcaagtaacatccaacatctaagatccaagtggcgttcatcttcacttgggtgtgaagctcgtggataatcatccaaaccagaggacagtgtctgaaaatgccagagataatgtttgttaggagcaagggtcatcatcagggataaggaaagctttgtcaaaattgaccaacataaacaccgcaactgtgttatgtgatcctaggatgtaatagatcaaagaacaactaactacaagtgagaattctggattcaaactcattcagtgctcatgtttatggctttctagtttctagtagcaacagagaaagccatccaatagactcattttattttcaggaaaaaaatgtgtcctattgtattctttgagtaccatcaaagatatggaacaccaacagcctacaaattatcaaatatgtaggaggcgggcgaatttcttcgtatattttattgtatttggcaagaaatctagagcaactgtgtttgcatctctatgcttaattaggattttggtctctgttgtagtagctatttatcaatgaatgtggttgccttaacattaacttcttataaaaccatgacaataatggtaaagtcaatctgctgaaatacctatatagtatatagttcagattaaaattgtagataagtgctgaaattaaaaagtatactggggatgcatattagaaccttaggatttatttcacgcattgtcctattgtcccgtccgtgccaatagtagctgcccatctgtttccctttattaaaaagtgatgataacaatgataataaaagggtcaaaacaaagcaacctatttctagtgatcaagcagacagcacgtgcaatagtatatacctgactgagttgtattgaaccaatggaaccatgcttccaatcgaacaaaggcacgttccaggaatagagagatctcacttctatccattgcagtaaactcattattcttcaagccattaattatatctacagaaacagatttttaacctaattcaaaatcaccaaattaatgtttcacatacgtctgatataaagtgatatttatagatataataatgtacttcataaaaattgtcactttccataaatttattactcagaatcatctaatgtatcatcaaatccagatcagttatgcataattcctaatttaaatgaagaatgtgcaaaaggagttacatggatatgctaccacagaagaggtaaaaaataaccaagcaggaagttgttaattatcatccctcaatgaaagggaaaacctgtcacatgcagcctggggtcctggactcaaggctcaagctatggcttgcttgaagtaaattattgtaacctatttataacaaggagaaatagaaaaggaacattagcatataccattcaatgctaaaaacagagttggaggatttccattagttggatgctgaggaacaaattcctctgggacccgactgcaagtacagaagaacctatatgtcaataggaaagctaaaaactttaaatttactgcaattatttgaacaaaatgtttagtaatacacctcagtgcttcagcccccaaaatttgttcacgcggtatccatccatcaacattcatcaaatccaaccaatgcccaatgatatccaatgaaatatgaatatcccaacgcctggttaatgtgcacaagtgcaaataaagcatatgtatacatcaagagttatttatttgttaattaatacaggtaagtcttgtgcattcaacgacaacaacaataataacaatactagtggtggtggtcatgaaggatattactaaaacaaaaaaactaaccagattataagttgatgaaaaccttcatcccataaaaatcctcttggaaagaaagatcgacttggtacagctgtgtaaagctcagcagaccaatacgacatataattgacatgttctctaagctgcaaaggaaaccaacccactgcatatctatccaagtctaaattgctgacagctaattaaaagtacaaaagttggcaatatcaagatgtaaaaaggaaaacaaaagtcactgacagcaattaattgaagagtaccaaattacactgttagggagagaaatatatgaggaaatgaggcaaacagaaaattaatacaaacctagctactgacacaggatttgttttcaagcctaaaaagatagacaaatgcttcacaacatcaaatctaattaaacttctatgatgaaccagagtgtgaccacctatcaagaagaaattttacaaaatggtggttctacacaaggcaatggttgtgcttaagaatattgccttcgctagcaaaatgattgtagtggtttcctttagagtcagattctcaattccctagcaaagggtaggattcaaaggaatggggaatgagaagcatacagtcaatgtaactcacaaatccttgaatacttatgttatgaagttacgcttctttcatttctttttttttcttccgatgtggagatcgttcttgctacagaatttcagaggattccagctggggatcacccatttcctatttctttgctttctactttttttataaagcaaaccattttcctatttcttatcccagtcaactactgatgcaggagctttttcagattcaaatttcttattggtttaagtcttctaattctaaatccattgatagttacaaggatttaaactttagactaaatatttccacttcactcaatctctggttgttcaaaaaaatattattttattccatttgaagtctaagatccactctaaggattaatatcacacacatgatcaaaatctctcctattgaatcacatgtccggcagttagatatttgtggtgtaagctttgataatattggtgaattgtgaatttgtacaaagagcttagaacattttctccaattagagggttctaggagaagggatatgaagggcaaggcaacttggcagtataaaatgttcactgttaataggtgattatggttagtgagagatgcgagaaatgcaaggttacatttttttttatattggttttacaataaaatagttttactctttttagcaacttcacagtgttcagataatatttatttcaaagtcaaaatctttattgatctgcagcatgatttgctagttaattagcttgtctaggttttcagtaagcattaattcatttatggatgcaactgaagaaatttttaatttagccagaatcctctttattggttagcaatcctctgttctcgtacttctttttctcatctctaaaatctcctctttaccaacagaaaatacaacacaagaaacaaagctttcacatttatgataatcacatgtcaagttatgcactattaaggggtggtatacacttcaataaggactataaaaaacaaaataaggtaacttacattaaggattcttgaaagagcaatctttgactggccatagaagtacccgatgccacctaataagtttccaacagcagccttaccaacagataaggcttcggaatccacctggaaatccactactatgataaagaatttatatccatcaaggataagcttctaaacaaatttactcaagcaaatgaaatttgagagatccaggacacatcaaaagacaaaacaagaagaataagggttgttttggtaaagaacttaatttaagggcttcttgaataagtatttatcatgtaagcacttgtatagtttttataatcaaagaggaaataggtttaaactattttcatataagttgtaaggttgctttcatgatattttggagaagttactgaaataagctaaaataacttatgaagataacacaagttgttttcgtaagctttccgaaacacttacactgctatatcataagataagtccaagtaagtagtaagttcttccaaacataccctaagtaattgaatttgagagaataaaataaaaaagaagacaaaggacaataaaattagtaccttcttggccaaattgaaaatcttctcaaacttctcatcaaattcttgttctttatatttcagtttattggacagtgaggtacctaacaatgagcaaaataacaaataaacaattacacactagcatgtagcatcctaatgccaattagaataaaataatctgtacaaattcggcagttctctttaaaatatataatatttaatattcaaacaagaaaacatcctaagagaaagagacaaaccaaaagccttttttttttggtcagcaaaaataatatatatatatatatatatatatatatatatatttaaagagaagaaagaaacagtacaagtagaaaaaagacaaaaaggatccaagcaaacaggacctatggcagcctaattcatgagaaaaggcatgaattaaactgccagaagtctggctagatcgaaagaaaaccctcaaaacaggagaagacttatacattaagtcctcccctgattaaaaaaaatgtcacccagattacaagaccaaacatgaaaaagaatattgaatcctttttctaaaattttaatccacatccagcaggtaaatatggcttcttccataagcaagtttataaaccccaacaatgtacatcaatatgagaagcaagtttccaaagcaatgaccaactcgacaactcctacaacaatgtaaaggactagattttttcctcctttttgatgagagcatgcatatatacatgtcagattttgtacaaacattataaagaagcagagaaaaacctgtaagcatactaacacgctcttcttccctagaagtttccaaatcagttccagagattagtacaatatctgttgtgaaaggaaatccaccaataatctgcagcacaaataaaaaaattgagaagcacatatgaagtgaaaccgtaaggaaagatgttttcaagagtagttggaaagtggttgtgtgtgtgagtgagtaagacaaagagactcaaagattaaaaatgttaaacgggtattacaaagtgtacatggtctatttacctgaaaaactaacacatttggagaatcatctaatgagtcagatagctgcagtcgagcatgcttttgtatctactaaaacatgtacataaagcaaagatatcaagggaaaaccccaaaaaaaaaaacaaaaatccataaccacattcttgcattacatgaaaattatatatcatcggataaattgaattgaactgaaataccctaacctacttgtgatgcaagattttcctctacgagatcagacaaattgtgaaagtgaggtgtgcgaaatccagcataatgcagctgcaaatcatcctgaaaattattaagcataagaaaatgaatagcaggttaccaccaggcataatattacagataatcaagagataaaaatttctacattaaggcaagagaggaatgatttaaatgggttatttatcgatgaaaggaaaaaggaggactgggaattttatcaaggtagttaaaatattaaataatggcatatacatgtttgctataaaatggggacacttattggtttatcatattcttaaactatttcaaagactgaaacaggaattgtgggtgcttctttaaggaagtgtaagtcaatcacaagcagtaaaccataaaatctataaaaaaaaaaatgtccaatggtagtacaagtaacagaatcttgaatgttcaatcattaccgttgatttcaaatgtagctgccaatctccaatatctgctcgagagccagatgcaagcaaagaatccacgtgaatgttcaagttttctctacttacatctagagcattaccagcttcatcagccaaatagaaaaagagctgggcacctctcccaaattcctcattcctcttggatctgaggttcgaccacaagaacaaagacactcaatagatgaaagtcactgaatagagctattctaagaaatgtagactcataaagggaaacaataagaaagatccacaggaaaattaagtattacttattatgttatgttataattaattcaggaaataagtcaatccaaaagctaacttaaaatttacaagggtgccatgagaatctctaacttcaacaaactggctagcatctacttagcaataaagaaaaactacaaaaaaaaattattctgtcgcaatacatatatgaaagtgatttgaagttgataacatcactcacttatccatttgcacattaattcgaaccgcccaatctccaccataaccactgccttcctcttttgattttaaaaacccagtagtcaaggtcaggccatggtcaaccagcacttgatgtccaaaatcacgtccattgtgccttgtccaaccataagtacctaggtcatcctcatgtctgcaaaaatgccgcaagtgatatttgccatccttcacaccaatccacattaatccagccatcaaagattttggagtcctgaaatagaaataccacccaaaaaaaaagtgagaatgcttgcatgctgagtcaaatatcgtcgacatccgtatcctaaacacaatctatgccaaaatttgggcacaccagtttctgtgtgatgcacaatttgcatgcataaataattcaaattactcacaactcgaaatatatacaaaccctgcaccatcaacaacagtataaggctataagccttaaccaccaaaatagtctcttacttcataattccatttcagcgcaaacaaaacaaagctgagtctgaatataccttgtggtttcatcaatcaataaacaaaaaaacacacctcaagcatacacacacacacacacacacacacacacgaattgtgcttcagaaacggtaacatacctggcgcgaattccgagatacacgtgaggacgataagttccccaatacaaactctccttgtgctcaccttcaaactgcaacagcaccaaccaagtcattcttctttcttcacgcacgctaaaatcgtcgaattctcaaaactgaaaagaaaaagaatggggaaagttgaaagttgacctgaggaaggtccattatctttggcgcgggaaatggcgtgacggcgcgaggaagcttcggttccgttacggaattggagaggtggtggatcataaaccagatgatgaagaatgcgacgaagcagataccgagcagcactttgagattggcattgttgtatatcggaatggaacttccgtatctgcttctctctctttggcgattgaacggaggcctcttatgtcgaagagaatcggcgtcggcgtcggatctcactctgcttcgaacggtacttcttccacttccggtcatttttggcggatcagagattcacgccaccgcatgcatagggatttggagttcgagtggagggagtgtttgcgtagcagaggtttcggtgttaataggggatttcgcagtgtagcagtggagttcggaaggaagaatcagaaggaaggagacgagtgacttgaccgataatgggcacgagcaaggaaattatcgtgggatgaattggactctgctaaatagactatataaatttctaatgggaaaaattttatacacccagaaaaagactcatgcaccattccaatttttttaaatagctaaagtactctcgcattatacaagtacggattcgtgaattcgtaatttctttttaagtcatacggattggcccaatccgtacgtaagttttttttttaagttaaaaaatattttttcaaataatgacacatgtaagtttcaaacatgtgaccttcaggttattaacacaatgtttcaaccaactgagctaataggtcaattatgctaaaaactaattaatattgatacatatagcattaaattttttaatgtatatttaatacacatataagtttatataataaattttgtaacaattaattttgatataataattaaagtattttttttatataaaaatcatagataaataaaaatcataagtttaataaaaatttgcaggtttaataaactataaatacagatataatttttaatttaacttgtaaatacaaatataatttttattagacctgcaaatttttattaaaattatgatttttatatgtaaaaaatactttaattattatattaaaattaattattacaaaatttattatgtaaacttatatctgtattaaatatacattaaaaaatttaatgttatatgtatcaacattaattaggttttaacataattgatctattaacttagttggttgaagcatcgtgttaataacctgaaggtcacatgttcaaaacctacatgcatcattatttgaaaaaatattttttaactaaagaaaaaacttactttggtgtataaagtttttcccatttctaatacactatatatttcttagaaatttatatattgtatttaacacacaaccacaacttgctgaagtttggactaacctggcccaaattcaaccttattttagtaaggctttttcttcttacactatagaattttcaacatacactatattgtaatagtgtataaccgaaaatacctatgtttaggtttttattttgaaattgttcaaaaccatcagcaggtgcacgcttcctctactttgacttccttcttcgtttgtgctttcttcttctctgtggtggtttgacggtggtggcattgctccggtttgtggtggtcaatgagttgcaggtggttggtgatcgtccttgggctgcgccgtcggttacccgtgagcgtcatttgatttgatagggtgattagggattgtggaatccgtggatatgatacgaattagtcattccataaaaggggtttgggggccttacggattggacaatccgtatgaggcatacggattacacaatctgtaagctttatacgaattgcctaatccgtaagtttcatatggattgcataatccgtaaactttatacggatttgtttgataaattgcttgaattgcctaagtttttcatatattattatgtttgatttgagaaattacaataaactaaattggtaaatgtgatgtgtaatattgatttgagggggttttaatttgaataattatcgtttgacatttgttttaagtttgatgttttgtttgtgttactttagtttttgcacttgcaatttgaatacttattgttcttgcaagatacctgggctatggaatatatcagttttctttctaaatacttattttagtttgatcattattgaaattatgttgaatttccactaatgataaacttagaaatggtagtttgttgaaaacctattggccattaggctatgtatttgttttgtgttattgattgttcttgcaagatacctggttgggctatattcattgttttgtgatattcattgttgttgaaagattaatgttaggcatagtgatacctgtgaggggtatacgtgtgatgtacttttatcagctaaccttgttgaaccaccatcaacaatgcgagtttcaattatgaatgattaatctcagcatagcgatacatgtgtggggtatatttttgttttgtgttattcattgtcgttgcaagaaacctgtgtgttggctataactgtgttattcattgttcttgcagaatttggctattgttttaagtttgatgttttgtttcatttgttcttttattttgatgagtatgtgtgaaaagtttgtgaactgaataagctcttggattattattggtagaggaaatggtgaaaacattaaacttgcataaaaatctggagagacctgctgctgcagaggaaggcgttgaacgccgtaggtctaatgcctatgctcgaagaagacgagcagttattcctgttgttgaggaaccagttcctcaggacgtgcaagttgaggctaacactacatatatggtagatgacataggtagtaaatctgaaggatttccaggtggtcgggaagacccttcgattttgaaagggtatagtaaccacgtcgcccttagagtgtgggccggagaggtaatttgacgccaaggtaatttaatgcacatgtaagttttattttacaacattaaattattctagtatttttgttgttgttaaaatttaattaaaataataataatacacatgaccaccccttaaaatatccaaattattaccaccggttattaattatatatgaaacaaataggtttttttttttctttttctttctaatgaagtataagcgtataacaaatataaccatatttttatatttatatatatatatatattaatcgttaattttttttatattcttaatttgttgcaaaataacaacacattgatttattttttatacaagtgaatttatttcttatgttaatgcatgtgattgtatgtttgtgaccattagataattattgaatatttgaaattgaatattacacaccaaaaacaaaatgaaatttaatattaccgtgaaatttaaaatattaattcttaatggcaccattcattcacaaatcatatctcagcatgtaaaaatttctcaagcttagcatttttggtgtagttcaagataatctgtaggttctcttgttaattcatttttcttactgttttgtatctttgaattcttttattttagaagaaaagcaataacattacttagatgacaggacgccagctaatgttgtttttctttctttctactcgcttagaacttagacgaagtctaatatgaagtttaacttcttccctcatccgtgtactcccaattttatcagtaatgataggtttgtaacaggaatatatatatatatatatagatatataaattaaataaaatcattttaaaattattattttttattttcttttttttaatctccttccctacaagccttcccgaatgctcttttatacgaatttatatgttacaaaataaaatttatagataaatttgcatgtttgataaattaaactataaattattagataaattaaactataaattaattattatatcaaaattaattgttacaaaatttattatataaaattatatgtgtattaaatatacattaaaaaatttagtgttatatatattaacgttaattatttttaaacataatgggcttataaaaaaaaacttacggattggtccaatctgtaagattacggattcgtcaatccataaaaaaaaaaaaactcatacggattgcctaatccgtaaggttcttacgaattcgtcaatccgtatgaattatgcggatccgtatgaaacaaaacatgtaaaatagcgaaggatattttggaaatttcactgttacgaaaatggtgtatcagaaaaacgaatggtgtaggaaacaacattctatttattttgataatgatgatcattagcggataagtaaaattacaaaattaaatatatttcttatgactattatatatcatgttaaaattacaaaacaaaacaattttttatctaaatattagattgcatatcatgaatcattttgtaaaataattgaattaaatttacttgaccgtatatcatgttatatatatatatatatatatatatatatatatatatatatatatatnnnnnntcataatgtaataaaaaaacatgaaaaaataaagaacaatgctttaaattaatttttttaagaaattgaagcgtagtaacaaaatggcaccaagataacaataataaaaaaatgtcacctatataagatagagcaagttacctttcttaattcatgaatcatatccataatgaattctaattaacaacatattaacactaaaaatactaatatagtattttgataatttacaactttaacatcaactagcgtcattagaaacgtaaatgtgatattttgataatttacaactttatcactagctcttgtaaatagaaaagtctttcccatttaaacttttttaacactaaaacagtaatatagtaatttgaagatttaattggcatttagttttgtaaatattgaaagacataaaataatcaaatcacacaaattgatagtgttggtttggttgagaggtttggggaggaggaggtaaaggaggcaatatggcaatgcaagtgacaagttggaatccatatgatggagagatctaaaaaaattgtgtgggagttgagtggtttaagatggtttgatgaaggactagattggaaaatggaaaaaagggataaaataatttttgttgtgatgcataagagggagagcaaaactttgccaatttatatctcatactattcctcattttattgcaaaaatttgacaaaattgacaatatgggaaggtgggaaggagagacgtggagatggaaatttagttggtgtaggaattatatttcttaggaagaggacttgcaaagaaagtttcaacaacttgtatcaagtatgggcattgataggaaacggttggatggttggaggtggaaacgaaatgtggatgagtcttattcagtaaagacaacatataatgtcattattgggaatgacaggaaccaacagacaaacaaaattgttgttctatatggaaggtaaatattcctccaaaagtgatcttttttttttttgtggagattgtttttgaacaggttgaccactttggacaacttaaaaaatgtgagggtagccgcgaaaggctctatattgtcttaccattatcacctgaggagaacttttggcaaaaacttgggtctgcaacttctgaacggaacacaatctagtgtgtgatggtctgacacatttggaatttgtgtaatgctattatttttggatgtgtagtttatgttttgtaaaaattgttggaccaaattcttttcacgagctggtcatggttgaaaaatagttcgaaaacatttcaattttcatttgcagagtggtctctgaatacggttgtctgcttatacagatcttaaacatggtgtggaggcttggaataatggaaattcaaagggtgataggaggagtggtggccaacaacttgggagaggaggaggattcaaacttgataggaggagtggtggccagcaagaagaagcgagacatcagcgaacagaagtgagccaaacaaatttagtaaaacgcaattttggacagcaaatcaaccaaaattaactcctagcagcacagagatgtgtgaaatgagaaattgaagcccaatctagaccgaacgcaaacagaagcatgaacaggaacaatcacgagccaaataatgtcgtgcacggacaagaattgatgttgaacagtaacgaacatataaaggagtccaaactagcttcaatcagcacagacaacaccaaaagaaagatccctagctcaaaagaaaccaatcgaactcgtacgaatgaacaggagcaagcgcaatgaagtttgcaatcgtaaatcagatacgcatgaacaataaagaaaattcaatcaagaacaagactgaaacaaacaggaaatctaaacagaacttgtgagattgaacatgatcagtgcaaaatttttgctgttgataccatgttaggtaaaatgaacgaaagagagagagagagagagagagagatggacagctgaatttcttttatttcgaaagaatgaaaagtagttacaaactgtacacgtgaggtatttataacctcttaccactaacttgatgaaaatacgggcttctctaaaacaaccctgacaagttggcgagcagaatgattgtgtcctatctccacttctttctatttaagttgaattgagcatggttaagtacgtgaagaatatcctcatattttcagacatgattaagaaacatgcattgctattcttgcaacggtaagcaaactaaaactgaacctaaataactagacatttccatggaattgcagaaattttaaaaatcttaaaaatgaaagaatttgagataataactacaagtatacgaaaaaaaaaaagataccttttttatatgatttccaaaatcaaagtaagcaccatgtgcatcatcaaaatgcatctgtatggtcatcaatcacaaattaggcattgacacagttatggtagtaacaaattgactctgggtcaccatgcaaacattaatctgctttcaattttcttttctcaaaaacatttaaaatagaaagaaaaatcagattattttctttatgttactacatcaattatccggactatattcaggaatcacggtgggaaacttcaattgctaaaagagaacatgtgaaaagattccgtgtacatgtagagtgtttatacttgaaggtttcatgcatgtaaatgcagcaggggtccttaaataagtcaacaattcactttaaataagtcaatagtctaacttggacacaacatcaatccacattaatcttttatagtgatcaattagtcattttctttgtaaaatccatgcccaacactttttacgagtccgtactttgtaaaatccatggtattgtaagggcccttgactagaaatctctaaacattatgttacctttgttttacatgaaataatctttttatgttttgaactctttcagctcactagtctaatcataagatatgctcccttactaattgcaacgaaattacttgtttataatgaagaacttcatgcctcttatcactaatttattatcatcatcgagtcgaaagaattttagaatcctgccttctgattaccaatgtagtacaattggaaatttcctggaatgttgcggtagcttctgaaaagtatgaaggtggaggaatgttttaaccccgaaaatgtgtaagaggatctttgatggtgatgcctaaacacacagatgaacttttggaatgataactttttgcctccacttatttttgttgacagaacttttaatttgaaatgacccatacattatacattattattgacaatttgactcccaccaagggagttggagggttattatacattgttgcagtatgatagccttatgagaaattagatgaccatcgtgtaatatgctatgaagatcttgttggtttgattactccacagtgaataaaaggtccagtgcttgggtaacgtggtttttctaaattatgtcatattcttccgccatgattaatactacaagtgatgtccagccggtaaatggatgagacccttttcccttaccgttattctgatcgtactgttcccacaaaaatccagtttgttgataattgcgtactatatttctgcagtaagatggcaattattatttaaaaaccaaccaatatcttgaaacaagattacaaaggtaccaaacaaaatcaaacaatacctaattaaattgcttctcagttctttgtagatagctttagctctgttctgatatggtccattctctacaacattcaccacaaggtatgaatgaagtgaaatatttgcagatatttggcctaggccagttcatattacctttggagtaatggtggagcgctgaaagaattctgtgattcatgtttatccaaatttgacctctccaatatggaccctcaagctcagagttgaatttcatgtacaaggaactgtgaaaaataattattttttggttaaccataagcaacataagctgaataagaccacacaaattcaatccattaaaaatgcatttgagcataggttgtaatataccttgtcgtggcaagcgatcgtagtccatagtcagtccaaaagagactgtgatttgaaatgagttcaagctgcttttccagaatccatgatccctgaatgagacagtcataataaaattatgcatatggagttattaggttgacttaatgatttaaggaagaagggaagaggaaaagattgtgggtttaaatgttttccactaacaaaaactaattaacaactaacatttgtccgtctataaaataaaatatgcatctaattgtgaagtcagtcaagcaaggaaaaatttctcagttcttcttagcataaaaaattcatgatattgagaatacatgcattacttacagatggaatgatcttccccatgaatgggaatagactaacataaccaatgtgaggaaccaatctcaatacgggcttctctaaaacaaccctgacaagttggcgagcaggatgattgtgtcctatctccacttctttccatttaagttgaatctagcatgattaagtacgtgaagaatatctcatattttcagacatgaataagaaaccatgcatagttattcttgcaacagtaagcatactaatactgaacctaaataagtagacatttccacggaattgcagaaattttagaaatcttaaaaatgaaagaattcaagataataactacaagtatactaaaaaaaaaaagataccttttctgtatgatttccaaaatcaaagtaagcaccatgtgcatcatcaaaatgcatctgtatggtcatcgatcaatcacaaattaggcatggacacaattatggtagtaacaaattgaatctgggtcaccatgcaaacattaatctgctttcaattttcttttcttaaaaacatttaaaatataaagaaaaatcagattattttctttatgttaaactacatcaattatccggactatattcaggaatcacggtgggaaacttcaattgctaaaagagaacatgtgaaaagattccatgtacatgtagtgtgtttaaacttgaaggtttcatgcatgtaaatgcagcaggggtccttaagaagttcacgttcctcaatatgttaattaataataatgagcttgaagaaggcccaaatgaagattacactcagatgagactcattttcattatttatatttaaggaaaaagtcaggcaaagccttgcttttcaaattggaacacttgatcttccattttggataaaagctcaataaataactaaataaatagtcttctaaataaagaaataaaaaagttttcttttccagaagcgtaatttgttttccatgttatttctagttctatttattctatagatgcatacactgttctatttcctcttttttcgtcccttttatttctctctcctctttatcttcacttgttttgctcctattccagtactgtatcaccaacagcaaagaagtgcaacaaccctgaagaaagggagagagggagcaaaggtaaaatacctggttcagtaactcgacatctgatagcaatttagcagtagaaccataattctgcatcatttcatacattatgtcaattattttaggttatttaactttctgctgcctacatttaccctacttgatatctaaaatttacaatgcataattacaatactgttgaatttacttttcaaatttatactttgccttgtttagtttccttattcaacaactcttcaatgtattgcagactatcggttgcaagtaacatccaacatctaagatccacgtggcgctcatctgcacttgggtgtgaagcacgtggataatcatcaaatccagaggacagtgtctgaaaatgccagaaataatgtttgttaggagcaagtgtcttcatcaaggataatgaacaccttgtcataatcaaccagcaaaacaccgatggctgtaataagtggtgcttgaatgtaataatagctcaaacatacctgcaagtgagaattcaggtttcatgctcatttttttggaataaaaaagtcctattattgtatcctattagtaccaccaaataaattgaccaccgatgccaaaaagccaaaaagtgacaagaaatctacaacaatcgtgtttgcagctttatgcttatgtaggttttggccttctgtaatagcaatctttcaataaatctcatttgtggttgccttaccattagcttctttttgaagcatgccaatggttgttttggtcaagttaatttgctgggctatctatatagttcagattgaaattgaattcacagaaagattaaaaataaatataccaagaatgcatattagaaccttgggacttaattcatatatagttctattgtttcgtccatgccaatagtagctactcatctgtttccctgataataataaaagggaggtgggggtcagaaagaagcaatctatttccagtgctcaatcagactacacgtgcattatagagtatacctgactgagtaatattgaaccattggaaccatgcttctaatcgaacaaaggcacgctccaggaacagagagatctcagttttatccgttgcagtaaactcattattcttcaatccattaattatacctacaaaaatagaattttaaccactttggtaagaattttttttcgtggtgtggcgagcagagagatcaagaaatatacagaaaaaaagttctgtactgcttcatagctaagtaaaagagggggcaataactttcatatacttgcattggatctatgtcccatataaagcatttttccacatttcagcagcaccaagatatttcaacaagtaatacatcaccaaactaatgttaaccatatttttttacctaaagatatagttatagatataattacttcatacaaattgtcaaactgtctccataaatttattactcggaaatattgaagtatcatcaaatccagatcaattatgcgtgataccaaagatctagaacaagcgaagttacaagggtatgttatcacagtcacagaagagacaaaaaaataaccaggcaggaagctagttgctaaagtatcgtccctcaagctcaaggaaacaaaaaaattaacatacacaaccaagcctaaagtcatgctagctcgaactcattaatggcatatatgtagccttcttttttaaataaagattctcataactagaagaaaaaaaggataatagaaaggaacattaacatataccacttaatgctaaaaacagagttggaggatttccatttgttggatgctgaggaacatattcctctggaacccgactgcaagtgcagaagaatctaagtcagtaggacagctaaaaattttacatttactgcaattatttgaactaaatgtttttactacacctgagtgcttcagccccgagaatttgttcacgtggtatccatccatcagcattcatcaaatctaaccagtgtccaatgatatccaatgaaatatggatatcccaacgcctggttaatgtgaacaatataaaaaaaaacatatttacagatcatatattatttgtttgctaaataataccagtaagtcttgtgcggtcaataaaactgtacttaaactgaatttcaaacaagacaaatgataatgatgatagtagtagtggttgaggtcatgaaggatattattagcacaagaaactaaccagattataagttgatgaaaaccttcatcccataaaaatcctcttggaaaggaaggtcgacatggtacagctgtgtaaagctccgcaggccaatatggtatataatcaacatgctcactaagctgaaaagggaaacaatccactgcatatctgcccaagttctaaattgatgacagctaattgaaaggtacaaaggatagaaatagctatacacagctatgcttatgcctatgacatactcttcaataagaactataaataacaaactacactaccaaagtaacttacattagagattcttgaaacagcaatctttgactgaccatagaagtagccaatgccacctaataagtttccaacagctgccttaccaacagatatggattctgaatccacctggaaatccactactatgataaataatttgttaacttctaaatcaatttactcaactaaatgaattatgaaagattcataacacatcaaaagacgaaacaagaagtataaatcatttaatatgagatagttaaacaaacaaaaaaaacaagtcaaaggacaataaagttggtaccttctcagctaaattgaaaattttctcaaacttttcatcaaatgcttgttctttgtatttcagctgattggacagtgaggttcctaacatcgagcagaagaacaaacaaacagatacacaaggacttagcatttagcaagctaatgtcaatcaaaataaaatattctacaaattcaataaaaagttgtctcgttctccttagaacatataatgtttaatgcaaaagaatcctgagataaaccaaaagttgttaaactatacaaataaacacattgaattcagaataaattatagaaataatttggtttttaagctagatttgaatacaaacacagggttttcccctaacacggagtttcctccttcaaaacaccagaaaaagcaatccgacatcttaattgccttctacaagtctgtcacacaacctatatatcactataactgtcattaatccgaaattaatataaaaataaatgcttaacaacttcctaatacaaaattatagtagcctaattcaaaacttggcctatcaaaagccaaaagaaataaaacaaaacacataagcccctatgtcgtccttcaacatgcgaagtaggttttcagagcaatgaccaactcctacaacagagtaaaaaactaaaattttatctgcttttacgtgaaagcacataaatataaagcgtagtttgaacaaacactataaagaagtagaagaaaacctgtaagactactggcacgcttttctactgttgaactttctgaatcagttccagagataaatataacatctgttgtgaaagaaaatccaccaataatctgtagcatgaataaaagaatgagaagtgcatatgaatatgataggaaaaccatgatattatccctccaggaccagaactttttgtttcagaaggtgaatctatcaaacttgatcagccattaacaagtaatccaaatgtgggtagatttggtcagggggatgcggaaatagtacttcaagtttgaagagatgaaatggaatgggatatactattcaattaagctatattcaataggagaaatagagttaggtccaagtcctgtgggcttgcctcaactaatgagactttgtaacaaggaaaattagtgacaagttagttagtaaattttactgatataaatagaatgtagaaagaaaaaggagtcccttttaattggatatcggaaatcattattccatgaaagaattcaccaataaagatagttccattctttctctatatacttgtattgcctgatacagttccttagagaatcttagaaaagtgtaaacgctgtattacctgaaaaactaatacatttggagaatcatctgatgagtcagatagcagcaatcgagcatgcttccttatctacaaagacatgcacaaaagcagagatatcaaagcaacacccaaattaataaataacttccataaccacatgctcttgaattacatgaaaattatatcatcagataaattgaattgaaataccctaacatacttgtgatgcaagattttcctcaacaagattggacaaattgtgaaagtgaggagtgtgaaatccagaataatgcagttccaaatcatcctaaaagagaaaaaacataggaaagtgaataaccggttactaccaggcataaattacagataatcaacatagggcaagagtggaaatggtttgtatgggataattaaaggtcaaaggaaagaggaggtatgaaaagtttgatataggtagttaaaatactaaataagggtgtgttacatgtttgctttaaaatgcggagattcataagtttagcatattctttgactgtttcaaagaaggaaacatgatcgtggactcttctttaaggaattgtagtatgactgtatgattaattaaccatgaactccaaaaaatgtagtacaagtaacagaatatttaatattcaaccataacatcacttcctagcattaccattgattttaaatgtagctgccaatctccaatgtcttctcgagagccagatgccaccaaagaatccctatgaactttcaagttttttctaattaagtttagagcattaccagcttcatcagccaaatagaaaaagacctgggcaccgctcccaaattcctcattccacttggacctgaggttggaccacgagaacaaattccctcaataaataaagtcactaaataaagcaatactaagagaggcagaggactcattaatttaatcaaatttgtttatcctaagaccccgtaggaggtttttattttattatttttctttctattttgatagtttgaataggttttatgcatttatcaaaaatatgaatggttcactcgtacaggtcaaaaataagaaacttgagccggaaaattaagatcagtgtttttattttatgtgttgtcattcgtcttgccttacttcaacagacctgctaggatctactttactataaggaaaagctacaaacaaaattgtttagcctcaatacatatatgaaaataatttgaagttgataacatcacttacttatcaatttgcacattaattcgaactgcccaatcccctccatagccactgccttccacttttgattttaaaaacccagtggtgatggccatgccatggtcaatcagcacttgatgtccaaaatctcgtccattgtgcttagtccaaccataagtactaaggttatcctcatgtttgcaaacatgtcgcaagtgatatctgccgtccttcacaacaatccacattaatcctgcaatcaaagattttggagtcctgaaatacaaagaccaccaccaccacccaaccaaaaatgaaagtaagaatgcttgcttgcttgatgagtcaaatgttgttgaccactttctctatgatgcacggtttgctgatataaatcagttagatttcatactacacaacacattcattataattagttattgcataaggagaaaggctaacaacatagtcttagagtgtatgtcagaaagtacaatcctcttggattaagtgtgaaaaatatttctaacaatcaattattgttataattaattatgaaaataagttttaaaattagatatattagatgaaagtaatttgaaaatattttgttacatttgaattgtttaaaaactattttttatggtaaaattagaaaaataatataaaattatttcaactaattagttttatagttaaaatgattaattcttgaaaataaaatagaaaaacaaatgcctgtttggtttaagcaaatgatttttatttttattttctgttctatttaacttttgtttatattttatttcttttttatatgatttgtaaaaaaaagtannnnnnnnnnnnnnnnnnnnnnnnnnnnnnnnnnnnnnnnnnnnnnnnnnnnnnnnnnnnnnnnnnnnnnnnaagttctaaaattttgcacctaataatgggaaaaacatcatttttataatttttccaaacaattagattttcttaaacaaaatgttttaaaccttaaaaaagtttctacaaaattaatcatatccaaacatccactttgagtgggaaaaaataagcccaaaacatttttaaaaacaaaattatatgtttgacaaaattatcaaaataaagaaaaagttgtttttaatataaaatatttactacaaacaaaattttaaagtttataactaaaacgtatcaattatttattattaaagttttatttttctattttatctcaagcaattaattaactaaaatgtaaaattaattattacaaaatatttcaatttattttctaatttcattgttaaaaaaggaatttattaaaaaatttaaagaaataatttatttaaaatttattcctttttaataattaattataaacataactcaaataatgttttttagctattaaaaaaatcaggtctgtttcactacagtaatacagtgtaaagtaagaaaaatatttcatggatacccatgctataatacatctacatttcatgagagagaaaaatataaatattataaaatttatgatatgataaaaaaaaataaaaaatattagtagaatgtttaaaataaatgagtatttgtatataattgctgataaagaaaatactcaaaatagaatacctggtacgaattccaagatagagctgaggacgataagttccccagtacaaactctctttgtgctcaccttcaaactgcaacaacgccaaccaagtcattcttctttcttcacttcacgtacgccaaaatcattaaattatcaaaaaatggaaagaaaagaaaaacagcaatggaatacctgaggaaggtccgttatctttggcgcgggaaacggcgtcacaacgcgaggaatacgatcttctgcagctgaattggcgaggtaataatggctcaaaaacaagacgataccgaacacaactttgttattgtcattgttgaacatgtacatcagattgaagcttcggtgtttgcttctttcggaagacgatctctctccgctgtgagtggttcttcttccatttccggtcattttaagtgcagacagtgtttgtgttaactgtttagcagggtaacgtagcggaagttcggggaaggaagaaacgagggagtgaagtgaagtgaagcaactttttttggtacttcaaataaaattctcatttcgataaatacaaatatcttctacttggagtttgatgcatacgtaagaaatgcaattgaaaaagttaagcttttttcttaagagtttaattcgtaagtgtacaaccaattaaaaataattgttggtaaaactttatgataatcattatgaaaaaatgataactatatttttcttgcacaattattacataaattatgagtttttttttttaatttggataaattagaaaactatatactgtaaaagacaaatacaccattattaattaatggtgaaaatcatcaggtagttaattcaagttataacatattcaatttccctgacgtaatgtcgttggttcaaatttgtagaaaactgagataaatcgatccgtttcattttatatgattcttaagattttggcataaacattaaaaaatgtaattaatattttgaatttcataaattatattatgtcactttctaatatactatttgtgtttctaattaattacatttttctcatttattacacaataataacttttttatcttcaataataactattcttgctaagggtattccatgaaaaatatttaatgtttcattattttttaaaacaacaattagtttgtaattttttttttaatttaaacgtcatcagaaatgaaaccgaagaagctatattatagatgtttttaactcaaataaaaatttatgggtgatttagacaaactctactgattacctataaaaatatttgggataacaataacaaaaaaatataacataaagaataaaccaaagttaatgacaaaaaaaaatagggtggaatcttccttttatttttttactttttttttataaatccttttttatcaataaaaataatatcattagcttaaaatagtcatattttgacatttgccctttctgaaaggttagaaaaagaaaatatacaaacattttggcatttgcaattaaaaacgttcacaaattcaaaaagagttggccttcggtgtggtcaaagagatgcaggcaattacaattacacttcatgttacttattttacttgttaaatttgtttatccactcttacgaataaaatagagtcaccattttaagatgaaataatttttaattataatattgctttaagacatgtaattttatgttttttaagagattatatattcttcaatagagagtaagagaccataactttccttacattgggaatgattactatataagattgtttctatttatatacaaaattaagtgttcttaaatttaaatatgattaaactgaaataataccgtggcaatttatttatttatttatgtgctcgataaaaaatattactatttactattttttaccttttatatttatttaaaaaatttaattatcaagtatacaaaattaacactatacgttaaaaaacaagttgacttttatatatatatatatatatatagatagatagatatatattagaaacaataaaatcaaatgattcaatgaataatagaatgagatccacacaaaaattttcaagttttagtcagttagtttgaatcctactttacaaaatattttaagttttaatgactctctcgttaggtaagacttgttacccaactttttagtacttgccattaaatgttgttgttgtgatattgaggccttgttgtctcgtgataggagtgagtcgcacttcaaaagaaacaaatgagtgtgtggattgattgactaaatttggaacaaaagagatgtttcattttaaaatcttcgaaagttaatctcctaaattatgtctatcattgaacttgccttctgatatattgagcgaaacttatattagagtagtcttttgtttgtctttcttctatcaatctagtttttaattgtactttcgttaaaattgagatcttcaaacgaagaagtcggtagtgccaaaactcttgaaaggaatgtaaggtaaggtgacaaatataagaattatcatatacccatctcaacattcttgaaaataaaaattttaacaaggaaacaaatccaaccttcatatagaaaataaagccaccaacaagaaacaataaatgccagacccgaaagaagaagaaaaaattgaggtaatcatattaaccgtagtagttcaatgattctaaataaataataaataaaaaatttccttgaggcattctatcaagcatatgctacagtcgaagagtctacccatgattctaaaactttaaaaagaaaattgttatcataattataatttcccaaatgaacattatttcactttatatgcatgaattcaaagatccaaatccaaacaaaatctaattgagcaatttaccattggatttcaagtacgtctaaaaccagtagggaattaaagattggatcaattaaatacataaggtcaagaaaggttgagttcaatgcacaaggtaagagtgttgctttatacactatataatatttctaatacactatatatctatagtgcaaatccgaaaatgcccttctcattattttgcagaaaatccgtatgcacatcccttggcaattacggatcaactaatccgtcctatcatccttggccaattacggatcatgcgatccgtgctctcatccctgccaattacccatttcataaattaaaactagcaacatagcccctatggatccaatgatccgtatgcacatccttggcctaataaggatcaatcaatccgtgtgtgtatgctggcctattgcagatcaaatgatccggacgcgcatcattggcaattaggcaattactaggcctactgcggatcaaatgatccgtacgactgtcatttggcaattacggattcattaatccgtgcccatcatttgaccaattcggactactaaatctgtgcgcattccatggccatcatttggtcaattacggatcattcaatccgtcagcattcatggcctatttccttgcttagcacggatcaatggatccgtaagcattccttgcttagcactgattattcaatccgtgtgaaattcattacggattattaaatccgtgggatttacacggattcgttaatccgtaacatgacatgaccaaaccggatgcattgatccgtattttatacactataccaccaacgaaacataactttactcacccagctgaaaatggcatctccgacgagtcctgagctcaacccagctaccaccgaccacgacctacctcctccaacaccaacagctccaatgcacaacaaaatcgcagcaagggaccaagcaaaatggaaatcgcagcaacggagaaagtaaaatggagagcacacagtgataagaaaagcacagaataaaaacaaacaaaaagggcagttttggcattttaaaaaattatatagtgtattagaaatattatatagtgtataaagcaatactcacaaggtaaagagtgaggcttaacctgatggtacgaagacccaaagaggatgggagcatgggccttgatagtacgaagacccaaaggcccagatctctgattgtgtgttttctcttaagtacagcacaaaacccaccaaaacaaattaattatgactccacacgagagattttacttgtgtttaaaaccataaagatatttgtttttgcttgaaaaaatctagatacaataactaacagagtaactaagatatcaatgttagttaatggaattgaaagtgatattgagtgcattttttaatacgtgtttgtaaaattaattttaaattaatgtgattttataaaattgattttaagttaagttgtaaatgttaaaatcatacggattgcttgatctgtaacactcttacggattaccaaatccgaatgccctccacggattccataatccatacgctgcacaatccttcctacggattgtccaatccgtttcctacccacggatcattcaatccgtacgagtccattttttaaaaatctgtgaaaattggcataggcagcagcatgtaacagcttttcaacaatgttatggttaatttgagaaactacaatggtgtatgtggtatgaaatatggattataagctttgtttaattgtgacattaacttatgaattagtatgttatttgagaaactacaatgttgtcaaacaatcctaaacctaaatagtacttcagtttatggtaagcacaaattcataattgttttctacatagtcattaggatcgctaatcagtattttgttctgcatcaataccctaaatcattgatatagcttctgcattgctttgggtaatagacatatgagtgttttttgatgcaggtcatgcaacatgttagcaaacaggatgttagacaatgaaatataaatgaaaattaaatagccacttatgaacagcaaaatatgcctaatactgagttcaaaattcaggatttcccaattgccaaaccaacaatcagtgcttatattcaccacatttttgacatgaatgcatggattatcatttggctgatgttttaagtttgatgttttgtttcttagttatgttactgtgacgactacttacccattgtgtgcatgaatatgtgttggatttatttttgtgcaggatatggtgaaaacattgaacttgcgtaaaaatctagggaggcctgttgaagcagaggaaggcgttcaacgccgtaggcctaccgcctttgctagaaggcgacgagcagctggtcctgttcttcaggaaccagttgttgaggaaccagttcttgaggaagtgcaggttgaggcagacacaacacatgtcgcagatgacatagttagtgagttggaaggatttgcaggtggtccggaagaccctaccattctgaaaggctttggtaaccacatcgcccttagagtgtgggccggagaggtaatgtgaccctgaagtgtatcctataatgatgatttaaatttaaaatttgatgtcgtataacaacttttctttcgcaggatcgtcctgagcttaagctggcctctcatggacgtaaggttgcgaagtttggtccccccgcacctgagatcgaaggattggtcgcttgtactgggttaagcccactggtttcagccttaatcgatacgggagaccggggattgatatccgcctttgtggagtggtggcacccagagactagtagttttcacctgtcgatcggggagatgaccctgacattagatgatgttgcttctctcttccacttgcctgtgatgggagccttctagacctacgatgtagttgacgtgggggaggccattacattattggtcgacttgcttgatgtgaccgtaactgatgcgcatgctgagaccgaacaatgccatggggcatatgttcgactctcgtggctccaagacttgtatgctcagaagtgtgaggcccgacagtgggttgtagcggccagagcatatttgctccaccttgttggttgcacactcttcgcgaacaagagtgccacgcacataagtgtgatattcttgaacgcttttcgggatgtggaccaagctggagatttttgctggggtgtagctgcactggtccacatgtatgatcatctaaactacgcctctcagcatcacgggaagcaccttgctggatatatatcactgttacaggtaattgtaaaacattatctaagttaactattattatgacatcatctaagtttactaagttcaattgttatttgataccgcagtactggatctatgaacactttccgaccatcggaagtgtgagtgctgatccttattatgatgagaggttgccctgggcctgccggtggaaagcttctaaggctttaccggttgcaacctacagacggcgattggataggttgaccatggatgacgtgtgctggatgccatacgtggaccatcgttcccacagacagttcgagatggtttcgctatttttaggtcaccttaggtggggaccacatattgtcagatatatgccggaaagggtgatgaggcagtttggttttgtccaagaaatccctgatttccaccactgtgatacgccttcagcagaggaggttgacgacatctggactcacttcgccgaccatcttgtccccactggagaccttgtcatttatcccagccaatgcgtcagtggctacatggagcggttttatcggatatcccatccatttgcccgtccgccagaggttggtgagcctagtcgacagccgactcgagtgacccgtgtgatgcatgatccccctcatgttgatggcgatggatgcgttggccagccaggtccagttcagccaggatcagatgtcactgacatgccccagcatgaagtggtagaatttcctataaacatttcttttacttatattttaataaattgacacttatcaaacacctaccaattttcatatgcaactgtgcgagcccatttcaatacgtcctcacgggaatcaaacacctaccaaaatggataattcatttttaatcaactaaattcattcatttaacaacttaaagtaaactcaacttcatatccatacctgagatgtactgaaagctgcagaacaatccacaaaagaattatcattttctggggcatcattttcttcttcaatgtcctcattcataatatactcgtcatacataacactgtcatacatccactcctcgtagttcatcttcacaaaacaaaaaaagattctaacatgcccaaccgacaattacgcaaactcaataatatttatcaataatgcattcacaaataatcacaaattacgttgaagcataccatacttaattatctaatttatccatactcattcatcatcaaacttttcaactcataaacaatttactttttaataacctattttaaatttttttaaattatttttcctttttttacaaaataacacatacggattatgtaatccgtatgtatataggtaatccgtatgatacatacggattacataatccgtaatagtaatacggattatgtaatccgtatgcatcatacgaattacctaatccggaaatgccatgatattgcctaatccgtaagtatcgtatggattaggtgatccgtaagtagcaaacggattatgtaatccgtacaatacttacggattacctaatccgtgtgctacttacggatcacctaatccatacgatgcgttaacagcagctcttacctttttagaccaccaccagccgccgacgaccaccgctaaccaccaatgaagctccgacgaagctcaaaacaatggatgcactcacaaagttacctataccagcagccacaacaacggaatcgtaaagcactgtgcaaaatcgacaactgagttgaaaaagcatggaatggcttaatattgtgctggaagggtactttggtcattagcagaaatatatagtgcatgttgaaatttatatagtgtatgtagaaattcccaaaaattggggttcatgattggacccacgaaactggttgggcttacttacttgtggggactccgagaaatcctgaacatgctcctagtccagattctaaacattcattatgctgctacagtcacaaatagatatagaccatgagtatgagtatgagtataagtatgagggagtgtaatagacaaacaaatgaacattgtggatttcaggggccatgcacttgtagttagctggattctttacttcccagtggtgttgtagctttcatgcaaagaacgtggcctctattacctctcttgtaggagacaatcacgtgccatccatgatccatcattaactccattctacaaagtaggtcatgctattttatttctattttttattttattgatcttggtcaatgaagataataataacgacagagttttagaagttcttaattaatttatgcttttcatccaaataaggggaatgtttacctgcattttagtaatgattgccataatattcctcaaacgaagtccacacagtttctaaatactcgttaaatgataacttgatattgcttaatccttttagacagtttaagcttaatttacaccatcattacaaaatcatacaatcaaattggttaaagtagaaaggaatgtgaaattattcaaattctgccaaattattcttgatcgttgatacaactatgtttctttcttctttttttttttcttaaataaaagggatgatgtattacgtactaaggtgagttgtggagaaatcataaaagcagtccgatggagaggggcagatgctaagggggacaagcgtgccccggtcccttcccttaatttttttaataatatatatatatatatatatatatatatatatatatatatataaacgtcatacattaatgggaaaaaacacttgattagatttgttctcttagatatattatttgtctatgctcaagtaggattcgtactactagatttatccacaagtaccgaaaattaacatacatcaacagtgttttatattatcatcattatgatgaaaaaacttacttctacaacacccctttaaaatactgctcaacaatattcttacactttcatatatccatttttctttaatgataaaaaaaaaattatagatattctcatacgacatctaaaaaaacgtattcaacactaactcatgaaaatagaatatttgatgaaaagatctctagtggaattttacaagtcaatatttggtatgaactctcctaattaaagactctatcattcaagtcgatcggcatttacaggatttctaaggtaaatgaattagagaatgtgtgtaacttttgccttttatgttagtaacgagcacgagcttttgagttggtactttttgcatcatgatgtgtggattaagatgttgggttgcttttcacgagatcatatattgagtcttatggttttggagtcaaacaattttgttttattttttctcttttgatttcatgaactgaagtgagcctataataatagctcagaatgaacagcatctaacttctatgcataattgttctcatcaatcaacccactatctttgaatttaagactcattttgtattgagaaccatcaacagtttaatcaccactatatctaatataattaaaataaagtttaaatatgttggagatctctaaaatagacttgaattttacaactgatctttgaaaaaaatttcttttttgttaggtccctaaaacttcaaaaattttgtaagagattcatatcgttagtctctgtccaaaacataatgatgtgtccgttagttagatacgtcaataatataagtatgaagccacttcagacgtccaaacgggtgaactacatcgataccatcttccccacctcctcccccctcctcggttggttctccacctgccgttcccccctctctctgcccctccattttttttcttttttctttctccctttattgttgtccctttcacctcaccaactcctatagcttcaacatcgacgtgttcttagatctttaagatatttgtttgggtgaaaataacattttttaactagaggtatgaagagagccattgccttttcacatttgtggttttccatatcattctctgacaagtgctttagttgggggcaacggcttcggagtggatgtggtgacgatgaaatgacattgtgctcacttgatctggttgtttcgacgtcatggttctcctactctacctccctattgtcaatttggttgtttcacaaaagctaaaccctcaagcaaaagccccttttcagaaaactccaatgtccagtaacatctcacacaggaagaatcgatgtcgatgcagatgttgctgtgatgttcaatctttttcgttgatgggaatactagacgtagagcaagagatagaaggagacaattacgtcgatgcattcacgtttattgtcgtgaagaggaaaaaccttgcaggatgttgcacatgacaatgaacgatcccaatgtcaccggcaacagagaagacagagataagaggacaaagggagaaagaaaaaaggtgtaaaaaatggaggggtagagggcagagcagcaacacgtggagaaccagtcaaggagggggaagaggggaaggtgaggaagctagtaatggtggcgaggaggaggaaacaatgtagttcacacattttgacatcgttattgttgacgtgtccaattaatggacacgaccatagagatctccaaaatttttgaaattttagagattcaacaagaaacaaaaaaaaaattctggaatcaactacaaaattcaagtatatttcaatgatctctaaaatatttaaagtttaaaataaaataaaaatatttcttcttcttcatatattgaaaaagcaaattattaatgcattttgttagaaaaaggttgctagttaaatgtataataacatgaaacgtaaatattttattttacatggtacaattttgagtcagctttatttttaaaactaattatttattatttataattaaataaaccgaatctagtttcctacatagaattttctctactaaaataatttaatgaaaacaatttccgtattatataagttctaacgtctaagtcaactaagtgacttctttgaaaggaaatatcagtcggccaacaagtacataaacaaatatctaagtttatgccttccaaaggttggtgatgaatcgctctcacggataagggttggttttcatatatatttagatttttcagccacgagaaaaagatttgcttgtttgatacttgtgataggtgaatcagaggaagagtcgttatttatttggaatctagtgacgttagattgtgatcgttaatctataatataacataacaagtcatgaacttgattatttgggtacaggtgatcattttttaagcaacggaggaaatcttggtcgtaaagctttaggtaatcatatcgttcacatgaacatcttaattcaaatatgctattgtggtgcttaaacatataaaataaatttgttatttaggtataacgtgaatttgtggtttttatttatttatttatttatttatgtccagtggttctgataaaaaaatgttcagaggtttaggagttgatagaatttaatgcagagagaattttagtatttagtaagttttttttttttttttttttttnnnnnnnnnngaacttgattatttgggtacaggtgatcattttttaagcaacggaggaaatcttggtcgtaaactttaggtaatcatatcgttcacatgaacatcttaattcaaatatgctattgtagtgcttaaacatataaaatatatttgttatttaggtataacgtgaatttaaggtttttatttatttatttatgtccagtggttctgataaaaaaaatgttcagcgtttaggagttgataaaatttaatgcgaagagaattttagtatttaataagtttttttttttttttttctggtgatatcaataaggtcacccagtttctcgcttctcataaacatatttgaagcattgatgaaaggtgaaaggttccacggcgtggatgagttgctgactcattcttcaaaagccacgcgatcagattcccgaaaggattgtcttgtgccagaactgattgcactaggagaagaaaatcaattgtttattcccattctcttttaagtcagggattcgtttaaagccttttgctaccattacaacaaaaacaatgacatcagattcataattgttgctataaaacttttctacaagatgattattttttattataagtaaaaattaaagataaataaaagatgatttataacaatttatatattttattcaactaattaaattagatttttttaattttatacacgttaatgtaagtatatgtttacattattaaaaaaaatatttagtgttattattattattttcattttatcattaagctaatatcataaactacatatataaagtaaatgagaaaaacaaatcacaacagtannnnnnnnnnnnnnnnnnnnnnnnnnnnnnnnnnnnnnnnnnnnnnnnnnnnnnnnnnnnnnnnnnnnnnnnnnnnnnnnnnnnnnnnnnnnnnnnnnnnnnnnnnnnnnnnnnnnnnnnnnnnnnnnnnnnnnnnnnnnnnnnnnnnnnnnnnnnnnnnnnnnnnnnnnnnnnnnnnnnnnnnnnnnnnnnnnnnnnnnnnnnnnnnnnnnnnnnnnnnnnnnnnnnnnnnnnnnnnnnnnnnnnnnnnnnnnnnnnnnnnnnnnnnnnnnnnnnnnnnnnnnnnnnnnnnnnnnnnnnnnnnnnnnnnnnnnnnnnnnnnnnnnnnnnnnnnnnnnnnnnnnnnnnnnnnnnnnnnnnnnnnnnnnnnnnnnnnnnnnnnnnnnnnnnnnnnnnnnnnnnnnnnnnnnnnnnnnnnnnnnnnnnnnnnnnnnnnnnnnnnnatttaattttttcaaaaaaacaactataaaatttagaaatattaatgtaataacttaatactagattataagaatattttgtctatacatacacaaatctgattttttaatgcaaatgcaacaaaatgatcttcgttcaagacgtcaaaataccatttgaaaccaaacatgatagcaccatgtcttttttatttaggattgcaccatgtttgagacgattaaacatgctcttaataattttggtcaacaaaatttctttcgaataatcaaatgtatttttctgacaataatttgttcgtcctacccataaataccttttaaagtctttttactaccccttgttataaaaaaaaacagacaaactttttaccccttcaaatgtgtctactccttttctatcgtttcaagtttttaacattnaaaaacaataactttgaacttcttataatctgtgtaggtagacgttacctaaatttttgagacattgatttggtgacaaaatcttataaaaaactgagagatgaattaagtaactaatttttttaaagaactaatgtgatgacgtttgtaaatttagaggactaaattaaaagttttcttcataatccaataaaaatgtaattcttcaaaagacttcttttaatgattttgtattaaagtaataacgcatttatctttaatatataagtgtgttaaatttatgaaagtttatattaaaataagaactgatatattattaccttctcacattatactatttattttatcttatgaaatagtaaatatttgtgtaagtgttctagagaatttatgaaaataatttataaactacccataagttgttttaatcttattttaggaatcttttcacgataatttatgaaaaaggattaattttatatgaaagcaatttaatcttatttttttcatttattataaaacaatttatacatatatatatatatataaataaaataaaaactgtgtcattacatgtttaataaatatctaaacagaaaaataatactactccactaaaaaagaatcttgtaagccattaataatcaaagcattcttacaaaactagatgttagaagtaatcatggcaaaagtatatttgaatttgaatttaaatttgaacatgaatagtaaaaatgaatccattgaacttcttccaaatttgagaaaataacagggagggacaaaactgtaattgcggaaaagtcatgacaattcgtcaattccgctgggggacaaaaacaacgcgaaaaggtcggtcggcaactgtgggccggaattgaaccgggggagataaaagcggcgcaaattctaactcttctctttcaaaaacaaaacccatttcaaaacgtcttgtaaccaaaactaatctcaaaacaaattaattaacattaacaataataaattaataattgttcatcctcaaacccatccacccaaacaaaaaactcaaacggataacgcaatacgtaagactcttctgagcctttatatatgggagaattatttatctaataaaggaatttatatttaattttgatgtgttaaattcttttgacccattataaaagaaattagtcggagtctgaaacacctttagtgtatgatccacaagactaaaaaaaataaaatcatccactcaaaaaataaaataaaaaacaaaaatagacactttggttttaattcccacttaactaacaacaaagtttcttaaaattccactctccaataaccatatcttcttcttctctctttctccctctaacttacttctcactgctctatccacactcaccctccgattccaacaccaataccctaattccgctattctccaactgttttcttcttcttcttcttctttcgttctctctctctcttttttatatgaagcctccttggctgtgatttttacttattactattatttttcagctcggtatgtcgttttgcttctaaaccctaatcctaatcctgcagattttactttaatttgttttggtgaaagttctggattgatgaaactgctgtatcttttaaaatcagtgttctgcttctgatagattgcgatgtttgtgttgtttccaagtgtgttttgaaaatttagcgacctttacaatctgtcctttttttttttttttcttgtggcctattattcagttcggtagaaaagtgttgcgaaagaagnnnnnnnnnnnnnnnnnnnnnnnnnnnnnnnnnnnnnnnnnnnnnnnnnnnnnnnnnnnnnnnnnnnnnnnnnnnnnnnnnnnnnnnnnnnnnnggtagccgttgtttgtttgtttttattttctctgcctaaatggaataaccatgcctgggatatcatgatattttataattttataaattatgctctgcaagtaaaacaaggttgaatttgttgttttctgcttcctgattctttcaaagtttactgaaatttgattcgtgtgtttggcctttagtgatttactctctgcttacttcataataagtcttgatgtaaggaaagattagagagactgattgtgttttgaatttcgattctgagctgattttttatcgttgttttttttttttttttttnnnnnnnnnnnnnnnnnnnnnnnnnnnnnnnnnnnnnnnnnnnnnnnnnnnnnncagtagaagattatttggtacctaagttaacgaagaccgtgactgtgaatgatggatgttgctgaggttgaggaaaatctgtttgccgcaagtgatgccaaggtatgatcatgtctttgattattttgtatgctgttttgggaattgcttttacagcgtgcacagtcctcatgccaaggtttaattgaagattcaaatctgttttgtattaatttctttatgttcttcatttaattatgtaggaaaagaaaacccgtttctttattattgttttcctagttattgtatgcattcagctaagaaaacagttgaacctgtctaccttttaaggtgcatgaacaatctttttacattgtcatcgtatctgctatttaagccaatgtttttcattgctggcctaatgaaaaagaaaaacagcaaggggatgtttgagttctgtttttcttgctctgtttttttttgcatttgtatccaattcagttacaatttatttttattgtctgtaatgtagtctgactaatatctatctggtttcttatgcagttacatggacagatgtgcaagactctttctataatatattgcaaagtattgtctgtatttccttctttagaagctgctaggcctaggagtaaatctggtattcaggcattatgttcattgcatgtagccttggagaaagtcaagaatgttcttcagcactgctcagagtgtagtaaactttacttggtatgatttatttcttctatagttttatttgctgattatgtttctgagtacagtttttattttaccttatcccatgaagcagttatctcttcttggcgggtaaaattatttaacctgaaatacatttttgtaaaatatcttacaaatggcattaattatgatgcaggctataaccggagattctgtcctcctaaaatttgagaaggctaaatgtgctcttgaagatagtcttagacgggtggaagatattgttccacaatctattgggtgtcaggtaatattactcagcagcatggctggtgctgtaaacttttttttctccttgtgggtggtggtggttagttttaggttcatgatccttttattataatattatgtggagggtcttactcattcttgccaattgctgttgtgatcatatgaattctaggccctattgtagatgttttattttgttattccaaaataattgaaatattgaatgcaccttgattacattactctgggtttggttttctgtaacactggcctttgtatattcaaatgcacaaaattctctccttcttgttatcattgtcaatgttgaacccagtctgaggtttgattgatttcctcttcaggttcaggagattgtgaatgaatttgcgacaatagaatttgcacttgacccatcagagaagcaagttggtgatgacttaattgcattgctccaacagggaagaaagtttaatgactctaatgacagcaatgagcttgaatcttttcaccaggctgctactagacttggaataatatcttcaagaacagctcttgccgaaagaagagctctcaagaaactcatagaaagggctcaatctgaggaagacaagcggaaggaattaattattgcatatcttttacatcttatgaggaaatactccaagttatttagaaacgagttctcagatgacaatgattctcagggttctgcaccttgttctcccgttcagggatctattgaggatagtgttcctggtagtcattgtcaagcctttgacagacaactttccaaattcagttgctttaattttaaaccaaatattagtaggacatctgggcagctgcctcttccacctgaagagttaaggtgtccaatatctctgcaacttatgtatgatcctgttatcattgcttctgggcaaacttatgaaagggtttgtatagagaaatggttcagtgatgggcacaacaactgcccaaagacccagcagaaactttcacatctttgtttgactcctaattattgtgtcaagggccttgttgctagttggtgtgaacaaaatggagttcctattcctgaaggccctcctgaatctcttgatcttaactactggggattggtattatcagagtctgaatctacaaattcaaaatctgtcaatagtgtcagctcttgcaagttgaagggtgtccatgtggttcctttggaagagagtggtatctcagaggaatctgtggaaaatggaactgaaagtgtttctgcacaagaggaagacactgagcagtattttagctttctggaagtcttgactgaggggaacaattggaggaagcaatgtgaagtagtagaacaattaaggctgctgctgagggatgatgaagaagccaggatttttatgggggctaatgggtttgttgaagcacttttgcagtttttgcaatcagctgtgcgtgaaggtagtttgatggctctggaaagtggagcaatggctctcttcaacctggctgtgaataataacaggtctgctttgtatttctagttttaatcattaagtaaaagtaaaactgcttttcatatgattacaaaatcaaaataattcttgatatttgagattgatatttgagaatcacaaccttgtgttttagccaaagccattgatgatcaaaactgatcactgagatttgcatagtgctagtggatgtaaaaaattgatcactgcccacattgaattttgttcgttcagttaatatgttctaataataaatctggcttaaatttaccaatatggtagagttgatgtttcattagctccttctaaattcacataacttttgtttttttttaacctctgcaaactattaacttgaggttgatctttacttttcaacagaaataaggaaattatgttatcggctggagtattatcattgttggaggaaatgatttctaaaactagttcttatggttgtacaactgcactttatttgaatctctcttgcctcgaagaagccaagcctatgattggcaggagtcaggctatccagttcctaatccagcttcttcaatctgacgctgatgttcaatgcaagcaagattctctccatgctctctataatctttctactgtgccctccaatattccatacctcctttcatctggcatcatgagtggcttacaatcccttcttgtaggcgagggggattgcatttggacagaaaaatgcgtagctgttttgataaatttagctacttctcaagttggaagggaggaaatcgtatcctctcctggactcattggtgcattggcttcgatattggacaccggtgagctcatagaacaggagcaagctgtctcttgtctcctaattttgtgcaatagaagtgaggaatgttgtgagatggtcttgcaggaaggggttataccagcattggtttcaatatcagtgaatggaactccaagaggtcaagaaaaagctcagaaactcttgatgttgttccgagagcagcgacgagacccttcaccagttaagacacatcagtgcccacctgaagctagcgatttgtctatgccgcctgctgaaatgaaaccgctatgcaagtccatttcaagaagaaagtctgggagagcttttagctttttctggaaaaacaagagctattctgtataccagtgttaagttccattggttgttgtaaatctgtgttagcatctttacttttgtggccctgcttttatcctcctcccgtggggtgctgcttatttttggttcaaagcgaagaagatatgtacaggcctttgtaatttatggattttgttttcttctttcgctttcctctttgtaatatcatttttccaagtattgttgtttttcttttctttgttttttatgttcgagggtgtttatatttcaatggggcttcaattcttaggcttaccattttgaagttaactgtgaataataatatcttaaggtgtttcttggtgaacaaactataaaggtcacacaatagtagttagtaaagagtgcaagttttcttagaagctagcggatgtcgctttagccattagtttcagctttaaacagtcatgcttcttctttggtccgtgtttcttgattgctttaccgcaattcttctcaagtaggatttcttataattccttaaaaaaagatgtcttatataattcattttgaaacaccataaacgtcaagtaattaactatttctcatgaaattaaattaaatttctcttataattatactcagtcacttgatttatcacagtaaaaaaaacaaactataaaggtcacacaatagtagttagtaaagagtgcaagttttcttagaagctagcggatgtcgctttagccattagtttcagctttaaacagtcatgcttcttctttggtccgtgtttcttgattgctttaccgcaattcttctcaagtaggatttcttataattccttaaaaaaagatgtcttatataattcattttgaaacaccataaacgtcaagtaattaactatttctcatgaaattaaattaaatttctcttataattatactcagtcacttgatttatcacagtaaaaaaaacacattatagaagtcactaaaaaaaagtttaagagcctccaaaattgttattaacttaaacaaaataacatccattttgcaagtatcatcttttttttttgtcattcatttttattatattttataaattcaaattcatcactttttttttataacagaaacatatttttaaagaaaaatagtaattacaaaatgtaatttaattttttcttaataatatttcttattaatattatgtatatatcttatctaaatctaatctaagatatatacaaatgtgaatatacatataaagataatattttgaaaaacacataaattaaataaatattcttataactatttatatttatacaatataaaactgtaataaataactataatgtaaggtaggaattattaactataatgtaaggctagccttttacaacatttctaaaaaaataattagaccgcggggtggtactcctttaatttgattgaggaacatcacgctcagtcacttgcattacatctttttgctttctcgagaggaatacgatggtttctcttcccatagttcaatatgaagagaaaatcatcgaaactgttgagcgcaaccccgttgtcgtcgtcatcggagagaccggttccggcaagagcactcaactctctcagatgctccaccgccgcggctacggcaaaatcgccgtcactcagccccgtcgagtcgccgccgtctccgtcgccaggtaactattcttcattttcactgaattgtgcgtaggactcctcgcgtcgtgtttccgtttctcactaagacgtggccgtttaaatcccgcagacgagtcgcgcacgagctcggcgttcatctcggggaggaagtagggtacgcaattcggttcgaggataggacttcgcacagcacacacataaagtaattgcgttttcgttttttattattccattgacttcacttggttttattttcaaattgtctctgattgtggttgatttgattgaattaaggtatcttactgatggtgtccttctccgagaaagtttagctaatcctgagttgaatgagtattctgtgatcatattggacgaggctcatgaacggagtttaaacacgtaagattattgaatactgtgtgctcttgttgttgtcaagtgtttggtgtacaattgttctgcatgaaactttttatgattggtgtgtttattgtcagggatgtattgatggggctaatgagacgcttggtaaaaatccgttcctccgatctcaaggttttgatcacgtccgctactcttgatggcgaaaaagtatctaagttctttgccgattgtcctgtattgaacgtcccgggaaagttgtatccggttgaggttctttatagccgtgagcgtccctcaagctatcttgagtcttcgctgaaaacagctcttggtatggcatggaatttgaaccttatcagcgtgttaagttaaatgtctgcttgggtcaacatcaacatcaataacacctttaatctaagttaattgggatcaatgatagatgaacacaatgatagatagatgatgttgaaaaaaaggaaggtaaaagcaaagaaggggaaaaggagaggggagatgaagagaaaaaagactaaaaagagactatctaaaacttagagataacaatgggtctaaccctccaccaaatttataactttttttcattcgatcctaagacataccgtccatcaatctatatctcactccattaagtcttgtttaattacatttcctcacgtaagtttcggtctacctctacctctcttttgtcgaactcttggtaacaaacttttgtttttatgggagtatccaagggttgtctcattaaagtgtccaaaccatctcaatttatgtttcctcatcttttcactcaccagtactactgttctctttcatcgaatatcttcattttttattttatccatcttcgtataaccacacatccactttaatatcgtcatttctgctatgcttattttatgctgatgttgcctatgtgttggtcaacattcaactccatataacattgcaggtcttacagttgttctataaaattttccttttagcttaagggaattttgcagtcacacaacaacccagatgcgctctgtcatttcatccatcctgctttgattctatgatttacattctcatcaatcccttcatcttttagcaaaattgatcacaggtatctaaaaccatctttctcggataactcttgatcaagtagatgcacggggtcttgatgatcatttcttactagtgaaaactcacatttcatatacccagtcttgctctggcttaacgtgagtcttttagactccaaagtgcttctccacaattcaaatttcctattaactccgtctttggtctcatcagtaagcacaatatcatatgctaaaagcatacaccacgacacttttttttgaatatcttttgttagttcattcatcactaaagcaaagagataaggactaagagctgaaacttagtgtatatctaccgtaataggagaataacttgacatttcattacaagctttcacatatgtggtagtcctatcatacatatccttgattgcatttatatactttaatggtacttttttcttctcaaaagtccactataaaacttttcttgggactttatcgtatgctttctcaagatctatgaacatcatatgtaagtctttcttcttttcttgatatcttttcattaattgtcgcattaaggaaataacttccacggtacatcttcttgacataaatccaaattgattttacagaaaccttggtctctgtcctcaagcgatgttcaataactctctcccacaatttcatagtatcgctcataagcttaatgcttctatagttagaacaattttggatatctttcttatttttgtaaatagacacaaatatacttttcctgcaagcatcatgttgtatactttgcttgcttttgtatgtaaataaatttgccttggcatcatgtagttattccaatgctatgtcaaagtgttaaatgtttgccttgccctttgcttattgataaaaacttatacgagacatacctattttttttttccgttaaggtaacatttccttaaaactggtattggctcttaaaagataatggccatggttaaaattgtttcatgtgagaacataagctgctaagaggggggatgcattttaaatctgaattgggaaatctttcgttcatgacttcatgttgatgtaaataatcacattcacttccttcagctcctttactgattgaatggcttgtaactctgcaagtagaaagtcaggaaatgttgtcatattcctgttgttttgaacacattccgtttcagatgtattatttcctttagttgtatttttatttttatttctagtgattgactaagtattggttttgcagatatacatatttgtgaaccggaaggggatattttaatattcatgactggacaggtgaacatttttgttatgtgctatttatcgtatacttttctactccacaatttaaatcttagtatgtattttgattataacttatttaggggaaatagccccttttctgttttgaagtttcccgagatagatttcctgtttctgtgtgtataagtatttgttttccagaactaacctgtatcctaaatccctcgatttctgatatgatgcaatgcaatgattgaacatctttcaatgatcttcatgtaggatgacatagagaagttggtatctaagttagaagataaggttcgtgctctcgaggaaggttcctgcatggatgctataatcctccccctacatggttctttgccccctgaattgcaggcaagtagttactcactctaggttccaaatacaatcacaattctataaactgatgtgatgatgcatgctgatacttcagataaaagaaacagcaattgtgagaatatttggaaaggcattttaatttcattcttatacataattcttagttttctttttagttctgtctataaaaaacttgactaatttgcatttgaagattgttgctggcttaggtgtgaaactgccttgagtgtatttctcttagttcattcctcttttaacttgttgcttaccttgtttgctttgtattacatctcaaatgatatttcttagcttgcaattaacactcataattgttccttttcatatgggggaaaaccttaaatatacaatggttggtgtttgagatattttatcccagaaaataaaatttgaggcattataatttttttggtgcatttgatactcgtgtgtaaccgacttcacctagtggggtaaggctgttgttattattttgtcgttgaaactcatgcatttattatttaatctttcaggtgcgtgtatttagtcctccacctccaaattgtagacgaatcattgttgcaacaaatattgctgaaacttccttgactgttgatggtgtagtgtaaggacattgattcttgattaaatattgttattttatgatcatcatgaagataaattattgtgtattattattgttgttgtaattgctattattacttattattataattcaaatgttttttttttctctctctatagcctattaattttcatcttaaccagagaagagattaaaagttcgttgaaaaccaaaatttcctgtaatacatttattgaataagtactgaagttcatgattaagctattcctgtaaaagcaatgtcaatattgcttaatgttgcacccagacgagtatgaaaacattgttggcaaaataatagtgagtgcttaatatataccacaggcctcagctggtgatgcattctatttctttctgacaaaatttaaaaatcacatgcaacaggatgtatcattgctttaacttattttttagattgcatatgttttgaggtatgtaactatgcagtttttgtaacgacaattaatttaaagactaaataggggtaggggggagataatgacatgtagcatattatgagatgcaactattgagacaagtcagacaacaaaccctgctatttgaattcacctattgtgatttggagtgtttttcagtcatttactcctttagatcaagcacataaacttgtcttctcatagtttctgaaactgtttttaattttatgaattttaggtatgttattgactctgggtatgtgaagcaaaggcagtataatccatctagtggcatgtattctcttgatgttgttcaaattagcaagtaagcaattaatagtttggtacctcgttgtggccttcataaatttttaaatacccaattcagtagcggtaagatgatttcaaataattcatgtgcagagtgcaagctaaccagcgtgctggccgagctggacgaacacgtcctgggaaatgctaccgcctatatccttcccgtgtttacaatgatgagtttttggacgttacagttcctgaaattcagagatcttcccttgctggcagtgttctttacttgaagtcattggacctcccagatattgacattctaaaatttgactttctggatcctccatcatgtaacatactatcttgggaatctttttttgtcatctcaaacattttaattcctttttatatttttgggggagggggtcggtccttatattagtttcttgtagtttcaaatattctttatccttgactagcagctagcaagttaatgagttttgctcaagtttactctggtgatttaataactgggttttctgcagctgagtccttacaagatgccttgaagcagttatttctgattgatgctattgatgaaaatggtgcaattacaagtattggacagaaaatggctggtacttgatttctttctttacattttagtgttgaatttttaatatctgtatgtagaactaacacattatgtaacattgttatcttcatcaagattttgataatggctttcactagtttaccatatttctgtctattattttcatagaagtttctttctgctaggcttgacatgaaagttgtgcttggtgttgaccataaaatttattcttttcttacccattcattttcctaatcatgtgtacttctcttggttccctgagttgtttcttgattctatgcagagcttccattagaaccatcgttggcaaaaaccttaatggaggcaaacaattatggttgcttatatgaggctttgactgttgctgccatgttatcagctgaaactacattgctaccagggcagaggtggactagtctgaactctgaagtttatatagatagatagagatagagagggagagaaagagaaagagtaggaggatcttatcatcctccacgttttcaattatactgaaaaggctactgtctttcaaataaatccattcttataaaatgtttaacaatttacatacttgtgaataattctactatcagtgaacaaaacaaatgaaaaaaaaacaggaacataggatgatgtgtatcttgtgttttaccatgacgaggcttatacgtttatacatcgacaaggactgagtaactgagcagtaacaaaactcctttaatgtgcagaaagactgagaagaagaggaaacatacaatatctaaccttcctgatggctccggattgggtgatcacattcaattgctgcagatatacgagtgctgggatcaaactgattttgacattggctggtgcaaagataatggcttgcaggtacctatatgtgatctagtaatgtcaactgtcaaggctgacataaatttgggactgagcttttgcaatgtagtctgttaaaaatgtttagctagaaaggctagtaatatccttgtggaatatttgtcttcactcttcacacatttgattcagatatagtatcctttaaagaaaaattcttatgggtcattgtgaaagacgtactgttatttcttgattataatgcatgcttgcatttttattttacctgtcagttatctaaaatttcttgtcttcataggagagccattctaaaatatgaagtgatatttatgtacatatggatcttttgtatttgttcaatgcataatatatgtgatcattctggaatcaactgattgaaggtgcgagggatgttgtttgtcagagacgtccgtaagcagttatcccagataatgcagaaaatatcaaagggttcgtattccacaatattgaggaatttacctgtataaagtgaataataatatacttttagatgctgtgataatgtcactacactagtaaaaacgaaccagcattttgattttgacacattcgtatcctctttaatctttttattcgttaattttaattgctcttttccttttgccttgccttcatccttattgtgttgatatgagcttgtttgtaatttgtataggattaatggggtcaaaactctttaagttttggcaaaactattggtttccactatatctatcatgttatgtatgttgtttcctccccactttacatattttttcaatctcgcaataggaccactggatgtaagggaaagtgggaaaagagaagagttcaggcaggattatcgaaatttgaggaaggctttatgtatgggctatgcgaatcagctggctgaaagaaagatgcatcacaatggttatcgaactttgggtttccaagctcatgtagtccaggtaatataagtttctagtcactattgcatgtcaccattacttttagcagctcttttgattcatgttgtgttaatataatatctcctttaagttttttccttaaattcttacacttttactgtgaagtccatatctaagggtgatggaacttacagaaatgtcccaatgaaaaaaaaagtctatgtactgtgaatttgtggaagttcagaactagtaactagtctttgtgaatttcaaccgaatccttggtttgtagatacgttaattttctgaatcttctatactaggtgcatccgtcatctgtgttgagtcttgatgacctggggaagttcccagactatgttgtgtaccatgaactaattgcaacaccacggccgtacatgagaaatgtatgtgctgttgagatgagatgggttatacctattattaagaagctcaaaaccctggatgtgtacaaattaaggtaggtaaatatggcagatgtgtgcagttttttttctttttcattttttgggtgggagggggggctatgatcattgatggctctaattcctttatctgaagcagtggtggtgttcatcatgttgaggaggaacctgagaaaaagcttccagatttacccaagaaggatgttgaggtggctagtactgctgatgaccgtgaaagtagaatccaagctgctagagaacgatttcttgctcgtaaaggccaaaaatgagcctgaaaggatgaagaggtcaaatacactagagatgatcttggcttgtcaggcattttattaggtggtatagttacctgaaaggatggaagagtctggatgagctgatgcttttgagttttccacgttgtcacaacaccattttcgtgctatgatgttatctcagcttgatcctcatcagttgtctctcgcaaacattacaagatttatcacagaaacctgagatttggtctcatactgttctgataagttggttgagtggctgaatgcatatatactttgtgttcatgcttttggtttgaaatatacccaggaagaagaaagaaaaaggaagaggaaggaaagaggagacagaaagtagcaaatccccttgacaagtaaatgttaattaaacagttaaggggttttgaaatgcaatcgtggatactgacatctgattgagataattacctttgggtggcacactttgcctgatagttaaattacatttttgtttatattgaacccgtttagatggagataatgcctagctgagattgcgttgggagttaaacttacaaaacattatggtagttatgtatatgaaacaggatcaatctttgtctaataggttgttggttctcaacctgatgatcactaattcaaggtgtctggacatcacctataatcaatgattaaaaaaaatgaaaaaggttttcaatttgggtcttagtctaaaaaaaagattggattataatcaaagtaatccagaaaatagaaatcaaatatatttgatttctactatttgagaatttgtccatttttttttttaatttcatctatttaatttgtattgattctaatgaatctaaaataataaaaaaaaaacaactcttattcttttagattttggattcttcttactgttctggtatcataataagaaaagaaatggggaaagactgagttgattgtcctctaacgatggcatattctttgctttggtgtattaagatttcaatctttgcgtatctcttgtcatgtttaatcacgtcagcatacataccatagcatatgcaaaaatatttatgtttataaaaaatctttcctggccagtgagggtgactcaaatgataggatcaagagttatttagttcaactaatgttgattaagttaattagcggtaccgctgtgggtcaattgtaagtacttttatacattagaccatattaaaacggccatgattaaaaagtcatttaaatttgattcatacaatatatggatgattggaaaatgatttatatgcagtagtatatatataattttttacaataattaatactagttttcactttatatatatatatatatatattagtaatactaatacaaatattattgtttactattttccaatcgatcagtgaaggtcaattcaaatggtactactgtattaacaggtcaattagaaatttagatgtattttcatagactggattgtcattgagatttatggtgaacttttgactttagtgatatagtacttctttttacataaacttttatttcaaataaaaaaaaggaaaaaatacgtcattactactatatacggttgtacaccatgcattgaaagtagcaaaacagactcacgggacaatcgacagaaccgcctaacacgtaggagcccagaatgacgatgagagatattttgtcgatgcaatgtacgttccaaagttgataactagcgtacagaattaagtatgcaacagcaatttcaagtaagagaatttttatgataccttcatgaaaatgatatttaatgtgaattaattacaaagcgtttatcaattactaactttataataataattttaattttcaatatagttaataaaaaagcttcacaagtcagcttaataattatgcgcatcattcttaacatagtaagtagtaaggtgtttttttttataatcttttttatagaaccatgactttctttgatttaaataagattattatagacgataattatttgagtacttaatactttatattgcttcatgttctaagctcaaagtcaagattcaaaaatcaatcttgtatcaatttattttttgcacattatttaataaacaataagtttgatttttggacaaaaggagacactactcattccgatgctttcatttacgatagagggtccacacacttgcatgcagcttctatgccaaggtggcggcttgtatagctcctatattgcaaggtggcacttcgtctatatagtttctgctatatggcttattttttctggactcattgttgacaaggggaaaaactttctgctttaagtaagaaccatgaatctcatactcttctgactctctttgtttcatgaaagttaatgatgatatagtataatcactatactatcactcaaatattcaggatctagttatcattcttcttccccctataaaaatttcctttgagttttcagcttctgttccttaggagtttgaagttttcaatactgaaaaatgaaactgactccaagagaggtggagaaactaggccttcacaatgctggctaccttgctcagaagcgtcttgctcgtggtttaagactcaattatactgaagctgtggcactcattgccacgcaggtacttgcatttgtatatattttctctttttttttttggtgattaatgattatctaacttgcatgctttttttatttatttattaatgattatcttccttgcatgcatttgtttttatatatatagattatggaatttgctcgtgatggtgaaaagactgtggcacaactaatgtgcattgggaaacatctattggggaggtattgtatttttgtatatatatatattatgtcatttttcatcatctcattctcaaaccccatgacatatatatatatgctttagataagagtttcatcgaagtatatgaatggactccaagttcttttagtcattttgaactagaaaaagctgaatgagccattttaaacaggagacaagttcttccagaggttcaacatctcttgaatgcggttcaggtatttgtctcactatggaaatgtagctattatctaccaataaaagcactctcactaatggctttgtagacattacatgaagtctcgttagttcagttactaatgacaatctttctttttgcccgctataattcaaactacatatttttttcttatataaggtgttaatatatttcctcattatttaatctctgtattatggatcttaaacttcaaatggataagtgtatctccaattttgtcgttatttatcttaggactctactcttatccctctgattataaaattttgtagtcattattaattattattacctgtatttatgttttaatataggttgaagctacctttcctgatgggactaagctggtcacagttcatgatccaatttcgtgtgagcatggagatctagaacaagcactatttggttcttttcttccaggtttgcttctattatgatattgaaaattgataatttgttagttggtatatctctctctctgatgagtgtttccagatgtgatcatgccatgcatgtactttgaagcttcgcttaaccatcgcttacaaaactgcatcttttatttatattttattcttctgtaatatttttctgttttggtttataatcaacattttcattgtttattgggaaaggaggaatctcttgttttttctattttaatattgaattatgagaggttaaaatatctatgaagtgtaatttgaggctaaattttttgataaaagattattgactagtcaatgatggtcagccatctggtttttctttttaaattaaaatagcttgaaacatataaccagtcactacattattccaaaaagctaaatattcctccaatatgcatatggtttgaaaacattcactcctttagtgtatagtttgtatggtttcatgttgaaattgttgggtaccgagcaatcacacaacaatcgagatatgagaaagagagaaaggggaagaagaaaacaacacacagagtttaccttgattcacgcactcgtacaattgcactcagattacaaggaaatatataaacttagaaattctaagcatagtagctattcatgggtccaagtcaaactacaaataataaaacacgagaccaacaacagtactaggcctcgaaaaaaaagttctgggggcgctgccccctagccccctctaggaagactcccccgggccctcacctgctcacccccgtgcatatctgctgatggcatagtatgagccatatctaacaaaaatcacataacacacttaaaaaacatgaaaaagtgaaatctatatgaagttccttcgtgttaacatgaaaatttgacacgattttcctaaaactgatgcaaaaccaagcatattatggttatggatatgcgcaagtacaggtttatttctgtaggtacattagcatttctcttgattgggaggaaaatgtgtttgcagtaccttcacttgacaaatttgctgagatcaaagaagataatagaattcccggtgaaataatatatggagatggaagtctagttcttaaccctggaaggaatgcagtgattctcaaagttgtcaacaatggagaccggccaattcaggtgtttgccttatattgtctacaagattttttccattgtcttgttcctaccaccttaacattttaaacaatttttttagttttctttatgcattaaaatgtcaaactgatttatgcaatttaaaaatgcccaagatttgctattgttacatgcatggctgcagcttctgaatgcagtgtgataagctgtttttattaacttattgtagcgtatgaaataatgaagtgatgttaacgactgcttttcggtttgtactggtttcgttatgttgtttactggttcattatttgaggatttcatagggtcctctggagactaaaatctgagtatgtgcatgctgttgacctttttaatttcaagtgttgcaaatgtagacaatttttttcatctggtgtactactgtttcacaaatcagaagcttttgagtttttttcttgtcagaccaaatattgttacagttttgaaacttgtcagaataataaattttaggagttcaaatatccaaacaaatttatttcttgttagcttttccaagtgaattgaagcaaacattgcctaatagttatgaaaatttcaggttggcagccactatcattttattgaagtaaatccctacttgacttttgatcgaaggaaagcatatggcatgcgcctcaacatagctgcaggaactgctgttcgctttgaggtgcaattctacattgctgcaagttatttatttatttatttatgacatgttcaacagttgaacacttgaacttattaatttaataggttctaaatgattaaccacatacatatttgctcttaaaaagccaggggattgtaaaagtgttaagcttgtaagaattggaggtaacaaagtcattagaggaggtaatggcattgctgatagtcaagttaatgaaaccaatcttagagaagcaatggaggcagtgtgcaaacggggatttggacataaggaagaggaagatgcaaggtttatcatttgttactgaagtacttgttatatacctttgcttacatctttaactattccacatttgagaataaatgaagatttcttacctcaaatgtaaatttcccagtgaaggtattactggtgaccctgactgtccattcaccacaatcattcctcgtgaggaatatgctaacaagtacggtccaactactggtgacaaaatccgtcttggcgacactgatttgtttgctgaaattgagaaagattttgctctctatggtgatgaatgtgtttttggaggtggaaaagttttaagagatggaatgggtcagtcatgtgggcatccacctgcaatctccttggatactgttataacaaatgctgtgataattgattatattggaatcatcaaagcggatataggcattaaagatggtctcattgtctcaattggaaaagcaggaaatccagacatcatggatgatgtattttttaatatgatcattggggtaagttcccttccaaaaatctgaagcaattaactgaattcatacaccattatcttgacacaacttatttgcatgtcatccatatcaaggctaatactgaagttattgctggagaagggttgattgtaacagcaggggctatagattgtcacgtgcattatatatgccctcaattagtagatgaggccatatcaagtggtgagttttacaactagaatcaatttataaagaaagatttcattacagtgggtatcttttaaatattaacgaatggtcaaggaagtacaggttctcttactttctctcatgaataataatacactcccaatctttggttaaaggggagaggaattccttcttacatttctcacctcatctccttttccccatggtagatatcagcctatgcagatgaatttgatggactttaacgagtccttttgtactttgtatgtaggcatcacaacattagtgggaggtggaaccggaccgactgctggaacacgtgccacaacttgtacaccagcaccatctcagatgaaactaatgctgcaatcaactgatgacctgcctctaaactttggtttcactggaaaagtgtgttgcctttttgatatatcttctgtttatatgtcttgtttttcttggcatattgcaaagttatttttcttgttccttgctcaatgttatgtgatggatttaagacctctctttcttcaaataattcaattaactttctattggttgctttagggaagtagttccaagcctgatgaactacatgaaataatcaaggctggagcaatgggactgaagctgcatgaggactggggaagtactcccgctgcaatagacagttgcttgactgttgctgatcaatatgatatccaggcacaacattcttcattacattttattttgtaatttttatcaatatctgctgctaacttttatgattacagattaacatacatactgacaccttaaatgaagctggatttgtcgaacatagcattgctgcatttaaaggaagaactattcatacttaccacaggtataatactaacttcaaaattgtttcccccttataaatctcatacatgacatgtaagattcaatctataggagtattagtgtagggaaagcagctaacatatattttataatccatcatttttctattgttattgaatatgatttcatctgtgatgtaaataggtgatagattaaaacttatgtctttcctagaataaattttctcacttctacaaatgccctatgcttatggatattgctctttcctttgggaattatgacttggacatggtttatactttatgttacatattcacttcttgcaatcacaaatggaaatggaaaacacaatgcagcttttattttctggtctaagttgtcttggctgattcttgatgtttccatattatttacttgagcagtgaaggtgcaggtggtggtcatgctccagatatcatcaaagtatgtggtatgaagaatgttcttccctcatctacaaacccgacgcgccctttaacagtcaatactatagatgagcatcttgacatgttggtaagatataaatctggtagaggtactaatgatgtgcattgtgatgacatgtggttctcaatttagactttctatgacatgcagatggtctgccatcatctgaatagggatattccagaagacttagcttttgcatgttcaaggataagagaaggaacgattgctgctgaagatattttgcatgatattggggcaattagcatcatatcttctgattctcaggctatgggtcgagttggagaggtttttattcaagctcagccatctaaatatgattttcttcctaactcacctttattataaatgaaaaatgaaaaaataaatagggtgcttcatacatttgtctaagtgttgaaatgaaatgggataatgtgcatgtggcattttcacaatatgtgtttcttttaagatctgttactgtgtcatctttatgctgttgtgtccaatacccccatttgtttttttgtagttcactagtactagtaactattggtgaaaatttagtttttttccccctttttgaaccctcagggtttgataagttgcattatttcttccttaggtgataagcagaacttggcaaactgccaataagatgaaggtacaacgaggaccactccagcctggtgaatcagacaatgacaacttccggatcaaacgatacattgcaaaatacacaataaatccagctatagcaaatggtttctcacaatatgttggttcggtggaggtatatgtgatttttaaatgtttaatgcatgctcaatatatgcattaatttctaggaaaagaaaaaagaaaccctgagatttccttttgattaaataacttattgtatacaatgtgttttaccatttaactgattaaagtacaaggtcactgtttcatatttttttgtcaaaaaagaatgttacactttggcactttgccatagcctatgacaatctcattcaaaatgagaggagtgaaacagaaatgcagaaattactagtgatatttcccgtgaaaaagcaaggttgcaaatgtcatcaatacttgctgacctatgttgatgttggccattggcctcttgtttacctcaggaaagaagcacgcacatgttagttggtacttggtaagaatttagtggattagataagttcgtagtataatttatgagtagtgctataatagtgaatacttgtacttgcttagctattcacgtggctgcatataagttgtttaagcagttcttattgaacatttgaacttgaactttcagtttttttattttttattttttgaaaagttcagattgagaaaaatgaatagttaagcatataagctactatacaagtcggttttctcttctctcataatttaacttcaaacttaacatatcagaggacagctataaatctgactctaaaccttctaattttagcattatcatccagatcactgcatttatgtgcctaactttgcaggtgggaaagttagctgatcttgtgatgtggaagccatctttttttggggcaaaaccagaaatggtgatcaaaggtggggtggttgcatgggctgatatgggtgacccaaatgcaagcatccccactcctgaaccggtaaagtttttgtatctaactagtttggctagagtttttaagtagagtgcctcttgcttagtctttttggtatttagattccttaatgttgttctatatttcctgatttggccataaaagaatttaattgcttatactaatggagtctattttagttttcttaagggcacacacacctcacctcacatcggctaatgcattcaggaaaatgaaattggtgccaaacttccaatctaagattcgaacaccaagcgtctcgagtaaacgcgtgactgaaaattaaaattatataagatttgcttaatggtgacaatggtcaaacgtattacactaatgatgataaacttttcattacttgtttcattagcattcataatcaatttcatgcaccattgcacaagttctaatgtaaaatttgtggttgagactaatttggacacacacctcaatgagattagaaaatctatattactaaaatataaaacagacagacagacaattagtttgtgtttggattggcgtttcaaatgtcccaaacgtccgttcacactttctaatgcacaaatccaaaagctacaatactgaagctttgagaaaaatgtcttgcaaacatgctcttagttgttgggcaattagcattttgatgaacctgctgccactaaacttattaaacacaatattgtaggtgaagatgaggcctatgtttggaacactaggcaaggctggtggtgctttatccatagcttttgtgagcaaggcatggaaccctctatccctcatacttacgtaaacaatttagtactaaaattacaaactcacgttgttgttgttgtttcacaaacaggcagctgtagaactgagagtacatgctctatacggactgaacaagagggtggaagcagtaggcaatgtgaggaagctcaccaaactagacatgaaacttaatgactctcttccacaaatcactgtcgacccagaaaagtacactgttacagcagatggcgaggttctcaccagctttgcaaccacctttgttcccctttctcgaaattacttcctcttttaagtactagcttccataaataaagcttataaattatctctcttctaaggttttaatgtgtagcactacccttataaattttttagttcccctactcttgttcttatgaattcagatgcaataaaactaagtgtgttggtttggtatctgttatgttttttgttctttttaaggcatcaattatgctgtggtgaagatgcacaagatagaattaaatcactagatgaatccctgtttaaagaataagaagaaacttggtgaaaaagtagaacaaagctttaaggagaggcaacagcttttattgctgaattttttggtaacacatgcatggtgcaagagatgctcttcataaagtttttttttttttttnnnnnnnnnnnacttttggaattcagatatttttgtatttttttttctttagaaagaaattttatatatcatttttttccaaaaccgaaaaaacatatatctcttttatacatcttttttattggatgtctttttcaaaagcacatttaaaggttagaaagttcagttatataattaaaaattgaatagggccctaattggatgagacgcacataattgaatagatccctcatttttctcgtgtttgtttggaagtatatatcataacagtaaaaagttaaaatattattattattattattattttgctttataaaaatgtaaagaatattttacacaaaaattattcgaacccgagcaatcataaagtaataaaaaaatgacctcttaaaagtagcattctcgcgtttccattagggttgtaacctctattgattatcacatttctttagtagaataaaaataaaaaatattaaaattaaaataagtttatggatttagttaattaataaataaataataaaatattggtatatttttacataaataattaattaataaaaaaattttgtacaaattttaaaataattattataagaatcaatcatctnnnnnnnnnnatcatttttttccaaaaccgaaaaaacatatatctcttttatacatcttttttattggatgtctttttcaaaagcacatttaaaggttagaaagttcagttatataattaaaaattgaatagggccctaattggatgagacgcacataattgaatagatccctcatttttctcgtgtttgtttggaagtatatatcataacagtaaaaagttaaaatattattattattattattattttgctttataaaaatgtaaagaatattttacacaaaaattattcgaacccgagcaatcataaagtaataaaaaaatgacctcttaaaagtagcattctcgcgtttccattagggttgtaacnnnnnnnnnngtctaaagaatacgaatatataaatatatactctcaagttgaagggttatgtgatatacattaaaaaatataatggaactcaaacattgcgttagatacttaaatggaaattaagatttgttattcatggcggtcataattaacttgagcataattgcttccaataaaaaatttgtgatctataaaaaaaatcaactaactcaatatttacttagtacacgagataggaaatttgtaggtttaataagtgctttgagttttaacttgttcttatcatatatcattcatcaattgatttaagatttaagacatagggtttaatattttttaaatagacaattgcaaatagagatggaagagaaaaaattacaaatataataaaaaattatatataatgacaatgaagattgaatttaacatttcatgcatattatttgactcctatattacacttatcttagtggatatatgtgtatatataacagaaaatataagagaaatagactatacattatcatatctaattataaattatcatggatgaaaaaattattgacttgtataattgaattaccataaattaaaagtcatatttagagatgcaattaaatgaaaaaaagaaaaaaaaagtgacaattagatatttatgtacctatcactaccgtttactaaacctaagcttattaattagaaatgtatcgagagatattaaaagataagcagttattagtaaaagaaaattttattgaaaaagacaaaacttctttcagtaatttctatattttaaaaattatatcataatttttagttatgagaatacttcactttcagaagaaaaaagaaatataacatatgggtgataatatacaatatgatgttgccatgtcgggaggaaaagaaatgaataaaaatgagaaacgcgggaggaatggaggtactaggtggtgaggaaatcattattggtaagtttatttattttttttttatagaaaaatgttttataaacaacaatgttatctcatatctagaaagagttgaaaaaataatattataaatatgattaagtttataatgtaatagaaaaataaaataaaaataaaaaaacattaataaatgtttaaaataaatgaatgcacatgtattattatttttttaatagtggatgatagacagcacatgcagattgatacatccactgttttcaattatagtagttgtaatcacgccactgccagacgtacagactagtgctccatcatatccaatgttggcgcacaagcctctccactactcaattctacccttccgctcatctccggcgacgcttgccgtcaaccgccgccggaggattcacttcccggccttcacgcggcggaaggtggaggtccaagcggcggtaagcggcggagacaagagccagacgactacgtctccgttggacagcaaagagaggaaggggaagagttcagtggcatcatctggctctggcattgatgaagggatacaagtgaaggcagtggtgacaataaggaagaagatgaaggaaaatatcagtgacaagcttggggatcagtgggagaatttcgtcaacggcgttggtcaagggatccagattcaactcattagccaggaaattgacactggtacgtgtgtttctcaacttaattcaactctcttttttttttcctttttctctttctttctgttattaattgatcatgattttaaggttgtcgagatgatcattcagagatcacgacttcaacaccgtcctagactttctttttttctagctttattaattatttcacttgctgcacactgcacagtgagaactggtatgcacaagtacaacacaactgcaactgcaagctttttcatttgatttgatttcatgtccccttgttcaaccaaaagcaaggaccaggaggcctacaaattacaaaaggaaaaagttgtttggtctagctctactgaactacgtgccttggaagcacctcttttattttaatatttcctacagtaataaaatatcttatttaacattgctttcaattattatcacattattaatataattgttttatatatttaattaagtataagtcatcttagaatagatatagtttaacataaaggattcatctgatagagtaagacaaggtttaaatgtttaacaacgacagttgtaatcaacccttaattgtctctttagagcagaggaaacataaagaatagtaatatacaaatattttattattttaaatatctttttaacacttttcatttttcttcatctttttttctatcatatcataaattatattatatttatatttttctatattttgttttcctcttgatgttaaataatataatgaatattaatgtatcatttttcaaatataaaatgacttagtccgaagactttttatctgtcttgaacatggaagtcattcttttcttctaaaaaataaatatattataaaaatttaattcttaattatataataattagatgctagagtaagtactaaaaaagtgttattaatttcataaactataaataacaaattaatattttgatcaaattctctctttaaattaagatatatatatactatttatgtttttttttaaatcatgtttttcactaaatgaaatagaagatttaagatttaacgttgtaactaatattgatgtgatcgtgttaaattaacttcttgtgtctgtagtctgtactatataatatctttttctgattaatttgcggtattttttatgttttgttgctttaaataagttactaattctgggaaaagggtgcaatcctacgtgagagggtggctaccgaagccgtccaacgttgcttacattgtggaatacgctgctgatttcagcgtgccaagtgactttggatgccccggtgctgttctagtcaccaatcttcatggaaaagagttccacctagttgagatcatcgttcatggcttcagcggaggacccattttcttcccagcaaacacgtggattcattcgcggaatgacaaccccgaaagcagaatcattttcaagaaccaagtgagtcacagctcaaccctcttgtaaagtctaaaccaatgaaaatttattgcctgatggtcactttcattaagtgttcatgtaaaaattgtttcagaccatgaacactaaaacttgaccatgtgtcatgtaaagattaccggagaccatacgtacaaaaaaagtatagactacacttgaagattagttgaaatcatgaacaagtggtgatcattattctaatgacaaactattacgtggacaggcatacttaccatcgcaaactccagctggtatcaaagatcttcgacgtgaggacttgctaggcataaggggtaaccagcatgggcaaagaaagaagcacgatagaatctatgattatgctacgtacaatgagttgggcaaccctgataagggcgaggaacttgctaggccagttcttgggggtaacgagaggccttatcctcgtcgttgtagaactggaagacctcccactctctctggtacacttcattaatttgctttctcgttagttactttttgtgttgggttttggtatgagcaaatggcatgtctaatggggtgtgcaaaatgtggtgtgtaatggatgcaatgccaatgattagatccactgtcagagagtagaattgaaaagcctcatcctgtttacgtgccccgggatgaaacttttgaggagatcaagcaggacactttctctgctggaaggttgaaagctctgttccacaatctgttaccttcacttgctgctactctgtcgagttctgacattcctttcaagtgcttctccgacattgacaagctttatatcgatggtgttgttttaagagatgaagagcaaaaaggggtagtggaaaatctcctagttggcaagttgatgaaacaggtccttagtgctggggagagtttgttgaaatatgaaattcctgtggttataaaaggtgcgatagtgaaacaaatacaacacaaccttgtattcgcggaaaacaacattcatttcacttgtttcttttgtatggttccaggggataaattttgttggttgcgggacaatgaatttgcaaggcagatcttagctggggtcaatccagtgaatattgagctgttgaaggtagtttttttatacctgtataggaagaaattgtgtggtactgtccatagctctggtcaatgtccacataacatgcaaccgaacttatcaattttcgacaaagagctaataaaactttattatatgtcacgtggagattgtctgagaccatgctagtcctaaatcatgtaataatttctccaatctaggaggttgtaggagtattaatatgttttctttgtcatttctttagccattctctttgtctttcacaggaatttcccatctgcagcaagctagatcctgctgtttatggccctgctgaatccgcaataacaaaggaaattctagagcaagaacttagtggaatgagcttggaacaggtttgctctgtatttctcttgctaattgagcttgacctgtttatctggaagaaatttgttagctctattaccaattatttttatattggtaggctattgaggaaaagagactttttatccttgattaccatgacatgcttttgccgttcatcaagaagatgaactctttacctgggcggaaagcttatgcctctcggacaattctcttcaatacaaagactggtattctgcgtcctgtagcaattgagctttcacttcctcaaacgcactcttccccacaaaacaaaagagtttacacacaagggcatgatgccacaacacactggatttggaagttggcaaaagctcatgtttgctcaaatgatgccggcattcatcaactagtaaatcattggtaaggcaattgaatggaaattccaaagtattgaataaatggctagattcagttagtttaattttgcaaaatcagatttcataaatgacttattcagaagaaatggtggattttctcaaatttagccaagagtaaaatacagtggaaaattgttgtgtgcaggttgaggactcatgcatgcatggagccatatattattgctactcatagacagctaagctcaatgcatccaatttacaagcttctacatcctcatatgcgctacacgttagaaattaatgcacttgctcggcaaaatctgataaacggaggtggtataattgaggcatctttcagtccaggaaagtacgccatggagcttagttcagcagcttacaagaacttgtggcgatttgatatggagtcattgccagcagatcttattcggaggtaacactaattttaaggcttttaaaaccccacatttaaatcttgctttgctgtcctttttgcacttattggtaacataacttagctaccattttaacttttgtgcataggacatagcatactatcaatctgttaatagtgctctcttcttttcaggggcatggcagtagaagacccttcaatgccctgtggtgtaaaacttgtgattgatgactacccttatgctgaagatggactcttgatctggtctgcaataaaagaatgggtagaatcttatgttgcacacttctactctgatccaaattcagtcacatctgatgttgagctccaagcatggtggagtgaaatcaagttaaagggtcactctgacaaaaagaatgaaccttggtggcctaaactcgataccaaggaggacctatctggtatacttaccacaattatatggactgcttcaggccaacatgctgccataaactttggacaataccccttcggaggatatgtgcctaaccgccctaccctcatgagaaaactcatccctcaggagaatgatcctgattatgagaagtttatccaaaatcctcaacttgttttcctatcatcactgcctactcaacttcaagctaccaaagttatggctgttcaggacacgctgtccactcattcccctgatgaagagtatttgggtcaacttaaacctcggcataatcattggatcaatgatcatgaaatccatgtattgtttaataagttttctgctagactggaggaaatagaggaaataataaatgcaagaaacaaggaccccagtttgagaaacagaagtggtgcaggtgtccctccctatgaactgttgcttccctcgtcaggaccaggggttaccggtcgtggaattcccaacagcatatctatatgatcaatttgataattgtttagtatgtcatcttatcctatccactagtatttgcttagcggaaaccacgtacgtacaagcatacatatttttatgggaaataaatgttccaatatttagtttcgtactgcattttattcgtgcgtcaaagtgaaaaatcacgtcgaaaccaagaaaatatacagaagatacaaatattaaacaaggattcccacttagtaaaatgagatattcatattatattagggaagctcattatttttttggagaattacataaactagaggcttagaatcctctaggaaaagaaacttgagctacatcaactactaaagcattaacgatacaacctagagcaaaatcaaaaacatgatagggttgttgagacttcaacacatacttatagccaaaccatctacaacttgatgggcttccctcaaaatatgattccacgtgatttgacccataccaccatgcaccatgtgaatttctcaaataatatcatagcagggatgcaaattactcccttctccaagaatgaggctgatagcattaagggaatcagagtctacccttattttccaaaaacctctggaccacgccaatttaaagccgaaaaggatagccataagctctgccttcaaaactgaagcagatcctatgtaagctccaaaaccacacaagcccccatatgatcacgtataacaccactacaagcagcattactatcagcattagttattaagcattcatggtattacttccagagcaaaattctcactctttccggcccattccaacggaaaaaaattttacatgagggctgatctgggatctcatccgtgttattgacttttgcataaactgatttcatagaaaatctcctatcacctgatccattccaagctatagtatcattgctgaattccagggtcgggggtatcaaagataagattttagacccaatatgagcagggagagaattcctgaaatcatccaccttccaactcctattcatatcaacatactcgtccaaagtcctattcgactccgtttcagaaatagagttttccattacactcgtcaaggcaccacaactgggcagtcagttgtcgctccagaatcatataatagaaccattcccaattctccagattacatttctgcataatatatcccaagccgagcaaaaacccttgtaccagtgttttaaaatccgaactgcccgatcgatcggactgggttgacacagcaatctgaggatcaaattgaactgacaatcggatcaatcataaattaaacatggtcattaaataattttattagtgtgttggaaacattctagtatggattgtgtctgctatgcaatacttttaatcctaaaaaagattattgtgaatttgctctttctagttttttttaaaacatttaatatttttttcatcactagtttattgttaattttttaatatatattgataacgcaatatctaaatgataatataatattgataatgtgatattggtatgatagtatgatatataaggtgataatctaatatgtgttgacgcatcatatatgggccaaattttgttcctactattagtcagcaccttattaatgtcacattcataaattattaaattgacaaattatttatcgcatcaccatgttagcgtgtcagatcattaaattacattaaaaaattgatactaagtgaatcagaatttctaaaatttaacaatatgagaatcaaacatgttatagtttttttcttggaaactaaaattgtattatctaaaaatttaaatatatttttgttcttataaaattaatatatattttatttctgtaaattattaatatattttttattttcataaaattaaactatattattttttaggttaaagtaaagtttagatgttcaaatctataaaaatataaccattttatattaattatatataatcaatatgaaaaatattatatttacatgttatttgcataatatacataaaaatcataatagtaaatttggataaactgagttttgtccatgaacaaaaattatacattttaattttatgttaacaaaaagtatatttttaattttacatgaaaaaaaatattttagccattcaaaaattataaaaataaaaagtgaatcattaattagttgaagaaatctaaagtcgtcgttatgcggcattgtcttgtctgtgtaagatcctctgaactttcaactttgtcacttgctgcacctaggaagaatggaagatattatatttttcaagaaaatactaataaatatttttaaggtattaattaaaaaatcctctgatcgaaaggtattaattaaaatataaaaaaaagttatagaaaaattattaataattataaatacttttaatttgttaagattttcttattttcagaaagaaatgagacaggtaagcagatgcatcatacatgagttaccattaataaaaagcagggtaagaaaataaaaatataaaataatggaatcatttctattttctcacgtcaccgctttgataacggcttaagaaatcagcaatggaaaatgctcgcccactccgccaacccaccccgttcttttccttttcatacatccaacggctcagcatttcccccaatgccacgcgtcacgaggcaacgcagattgcatttgatctcacgattccgcgccacaccgtgagcacctgggttcgcgatgcgattcgttctctgaggaacaaaagatgaatgcagtggatttaagagagtcctattagtctcgtaagtaaaagaagaaagatgaccaatctgcaaatacaaacagaggaaccccctcagagtcaaacaccgcttctaatttcaattcagcagcaactagagaacgagaatgagggaaatcatcatcataataataattataatgagagtaagaaggaccaagacgttgaagttgacgatgacggtgacggagagattgtggaggcgagcctggtgcgcttggagcggtttcttacggtgttagggttcaaccaggactcggcgttgagcttggtggtttcgtggactgtgttcgcggcggtgggagtggtggcgccgctggtggcgctgtccatgtgcgagtgtccggagtgcgacaggtacgagattcagagcttcgagatggcgatcgtggcgtttcaggcgagcctagccgccgtctccttgctctgcctctcccacaacctccgcaagtacggtctccgccgattcctcttcgttgaccgcgactccgggaagatgcattgctttcaccgcgactacgtcgctcagatttcggtctgtttccttttctctttcgctagctccaatgtgcaagcctctgtttctgatctgaatgcatgatagcttgattactttgcttgacacgagttatttgtgaaaaacgtttttattttttttactgtatttggtgtagtcagggttgttgctcgaaaccagaatttgtcgctgtttcttctattcgtattattattagacattcgccttatttgaaaactttttcaatatgtgaggagtcaaatcatggacgattattgtgtaacctttcagttcttccttattcttttatgaacatgttattattctcttagctttgaaatgaaaagttaactattccccattaaggagatcttaaatacttttttttaataaataacatacaaaatctagatatagttccttggatgcttttgctgatgcttttcaatcaaaattagagtttcactctgcgcattaaaggtttccattaaatttcaacatagctgaagtgaaactccaattttgattgtagaacagtagcaaaagtgcctcagtgtatttatattttttcataaacaatacatgcatgatagtgtaatccgatcataaactgccttgtaaggttagtttgttaccttttataaaaactacctttccaagtcataccaatatgatttctgattaattcagagtacattcttttattgcctattaaactctttttctttttcactgtcaccagggatctatgcgcatgctttttctgtgggtgttgccgtgtttcattctgaagacagtgcgagaaatcattcgcattttttatgtacaacctgggtcctggtggctctcacttgctattttatcagctttgattatatcttggacttatatgagtacaatctctctgtcagcctgcattttgtttcacttggtctgtagtttgcaagtgatccattttgatgattatgggaagctcttgcaaagggaaagtgatgttttagtctttatggaggagcacattcggttgcgctatcatctctccaagataagtcataggttcagaatctatcttcttctagagttcttggtcgtcacagcaagccaggttgtgacgcttttgcaggtcactggatatggtcaaatgcttaccttcattaatggtggagattttgctgtaagtccaactctttatgttcaaagtatttatgcatttagattgaaggaactaattcctttcatttcaccatttctttttggactgttgtttcttttaggtatccacacttgttcaggtggtgggcatcattatttgtctgcatgctgcaacaagaatttctcatagagctcaaaacattgtttcccttgcgagcaggtggcatgcaatgctaacatgcacatcttctgatgcaccctctcaattgagaagctctgctagtgcagggagcttggaagctgccaaccatttgaacgcaatacaagtagactattctgaaagtgatctagagtcaatggattatgctggaatgtttacaaatacccaatggacttcctatgtgtcttcacatcacaagagacaagcttttggtatgtaaatcaaccaccgtctgtaaactgatgaattttacaagtttttctaattcgtgataaaagtaaaatgtttatagaaacatcatatatgcttcattagtgttatcttgtaacttcatcttgcatgagaacctacaataatctgataatgttacatgaaatggtgtaagtggtacaggtgtgttgcaagaccaaattgagatgaaataatacttaaaacatcaacatcaacagcacctttaacccaaattaattggggtcggtatgaaataatacttaaaagacattagtaaaattacaacttggaaagatccaaggaaacatgtatgttagagagtagttttctggattcattaatttttacttatattttggtgaattctggattcattaatttgtgattactatattgtaaaatttgttgaacattcaaggcacattgaaaacatttagtcctgctaaaaaggtagttgacttgtctaagagaaggaaagggtatattctgctatttccaccaaggtcatatctgattgatattcatttgcattattcatctctcatgttcatggaccaaaactagcttcatatggctacttcattttaatacagctgactatgcaagcttttatatatgatactatcttattagattagcaaattagattctcagaaccatcttctatatgtaatgtaatgtgcaataaacatgtcatctctctagaaaatactgaatgcttaaagtttcattttacatgattactaggtcattctattgttctcataataattactatgtaaatcactatttttatcaaatattttgcaaatgtgaattttctcattttgtgtattttgtgatattagtgtacttattttccttgttcatatgtatagctttatttactatcaatatgttggcaatcatgctaaattacacaagactttctgcataactgcttttggaatgtatttttaagttgagaaatcgtgttctttctggtttcatcacttgaatgcaggctgttagcttgttttatgtctagcaggaggatctcatgcttgttggttcttttaaatatgcagtgatgtatttgcagacgaatccaggaggaatcactatatttggatggacagtcgaccggtctctagtcaacaccatatttttccttgaattaagtctggttacctttgttctcggtcagaccctaatctaaggataaaatttgcaaaatgacatgaaaaaaaccctttggttttaggtcttcctggttaccaccatcaatttgattgaaagtcctccacatgccgagccagaatgtcgcatgcacacggtagtcatgcaaagtagagaaacagtgtgtattgtccacccggggtctggaccaggcacactactgctaaatgccgaggcctcttccccaatccccagcaaaacagatgtctccaaaattctattcgtcattctcattcctcagtcagcatacttatgttcgtggatcttgtggcttctaattggcacaatatgcaatcaaacaacatagcttaaacttataccaccttaagatacttggcagttttctgcctacgtgggctcctcgaagcagtctttctccaattgtttcgattcataacctaaggtttgcaccatctcatttgaaatcgaaggatcatagctatagtcatgtcaccccctgcgttgaagattccagcctctggacatctctgacctttaagagcgttctcatgttgaactcgtatgtgttttgctttgtagttggaagcaagaaaaggtgttgggcaccaggaaggacagaggtttaaattttcaactaggaatatggaggttggcccaatcgtgttgggtgtgcaagtgtcggtggacagtcatattaccgagtaatgttgcttgcaaattctgatctagttagattacagtgattgtttttattattattatttgagatatggttaaggatgaaacaagggcctataacttccaacaagtaacctattcccatacttcatctcagaaacaagggcattaaaattaagcgacgataaaaggatgttttccgtacttcgaaagacaagtttataattattggttggtcgtgcaccaaccctctttcattttcttcacgaaatttataaatttctttttaaacaaagaaaaattcaataaattttacttattcagtaatcttcaatcaattgcaaattgatattttctgttctttacttgtacgttgatgcatttgctctgaaatcaattggagtaaggttattttagtttaattagtagttttgtattttagtccttgataataatgtgtcatgtacttggaattgaaatgagaacttcgtcttgatatgtatgagttaagtacttgtaatgagaactttatgagtcagtgttcttgggtggttcgagtaagattacttcacatggaatatatttatctcagaaaaaacattcatgcttttaccacaggtatttgtcgtacttgttactatattcaagtccatattttgaaattatttgataaataaagaagcttaataaaaatcttagcctaatggttatagtacaataaaacattcaacaacttactgttggttttatcattacttaattaacgatccactagcatacttttctattcataataaaatattattataaaataaataaaactcattaaataagtaggagttgttgaaatcaaattgttgcttcaatctttaaattcaagattttcccatcctccctcatgcgccaaaatttaggtatggtgagtcttctcggatcttggactcatctttaaattctaaggtttcaccatcctcccatcataagcaagtaaaccttgtctttctctatgttttgaccactttcagtcatcaaaatcctagaataatagttaattagtccattttagcctcccacaatacttcaaaatagttaactagtctccatttaccaaaagatgcaatctcatacaacacaacaagtaaacatgatatggacattctcacgtaaaacactggcagcctgtgaaatagaagtagaaccccaccaacccgcacttggcaaacctaatatatttttcgtcaaaacctgcctattgaaagagagagagagagggaggggggggaagtacagcttatgcttactgcatcatcgcccatccagtgagtgatgcttaatgagaagtggatgctttacatctcttagcaaccccatctcccagctgtaccaattaatagagttatcaattacattatgagcattataaaaatgcatcagttattgcagaaatcatgaaagcaaaacaagtggatcccatcttaaattaaataaaaaaccctcacccacgatgtcaatgttcaaaaagtaaaggatgttctatcatggtgtgtaaacagggggaagggactcctttaatgggtagaaggataattgaaatattcagaaaggaatcacaggtaaccgtgaaaacaaccaacatttaattcccaattaagatttaagatctagttctggcctccagattcaacagcaaaacacctcatagtcatattttaaaactagcaaaggaataatcgccacaatattagacaacaggacaattttccggtgacaaaattcatcatttcaaattgccaacaatgtagccagtgagtcagcaaactcaaatagtcatttggtgcagggtgcaaattgtgtagaggcaacatagtatttagtggtaacttgtataaagtgaacatagattttagcacaggaaaagcctcaaatatactgaaactaacatatagattttagcacaggaaaatcctcaaatttactgaaacttaacataaatagcgagttaggttagagccaaaaagaatcgttacagtacatcatacggaccctggtcaattttcttccaactagttaagggataatttcataatcattacccatagggaggcggggggcagggataagtttctaaacacagattagtaatgctgtgtttggttgagggggagagtagagaaatagagaagaaagtgtgtggggcccatgtggatcctacacctcctacaatcaacttcaattcaaaaatttatcttctatttctatcatctctcgttccatcctctaatcaaacacaagcataattgctccaaaagatgttttaatcaaaacaatttaccataaatttaactgaacatccaagcaatcaatgataattcaatgtcataatccatcacatcctattttaaggaaaaaaatgggtgagggtgactatatcaccatgatatataataaataagaaattattaaaacatagcaaaagtcaatatttcagatcttaaaaacctataaggataaaacaaagggaaaaacacattataacaaaccaagttttgcattgtacctctagagagactgaaggaacaactaattgaagttctatactttacgatatactggtaacctcttcaacctgcttgctttgatacttgatactgcagtgacatttgcagacaaatatcataaaatattcttgtacttgtcaaaactttaatcttcagacgatgaatacatatgataaaatgataacttttgctaacttttgacttcttgcattaaagaattttatactcttagtgaatgaacaccagggggatgaaaaactcaaaattagtgtatgtttccttgtcatgggaaagagggataaaaaataaacatcgttaaaaaaggttaaaaacaggcttaaagtacaataataagaacccaggaaaaaaaaacaaagttggatatttaaggaatatcagtttggcctcgcctcagaacaattggcaaaataaaatagtcattaatacaagacagcacttcaaaccaagaagaacacaaaaatgttttcaaacacagctgttatacatcattattagggtataattttctaaccagtatatatgatggaaaaaagaaagacccatttttcacatttattgaggcttagtgttcacaatctaaatgtaaataaaaatacaataactcgtaaacaaagctagtgcaatatatatcatggcctaccgttaaccatggaaactcatgaaattcttggcaaatcacttcacttagatacaacaatctgaagcattcaccaataacaggaattaaattattgtataataaatccattatagaatgccatttcatttaagagtcggtcattgtgctcacagaggaagaggttgcaccacttggaatcaaaagaagtgatgattcacatccgcaataaaacaatgcatggtaccatcatgtcattcacaaaattaaatttgagagaatgtttcaaaatgcaattgctgacttatataatagaccaataatatgagcaagtagcaattaaaccctccatcatctccaacctccccccccccccccaaaaaaaaaanacttcagattctagacattatttctctcacagataatacatatcctcattccttaatatcaaaggaatgcattacctttcaatgcatataatgtcactcaatttctttggtaagatgcacagaaggtcctcttccacttcacaccaaccgtctcttgcaaacacaaggtgaatattaaaaaagaaagaagatatagctgctagaaaatccatagtgctttaatactcaaaaccagatcaaatttgtttatacagtatgccaatggatatgttacaaagcttcagctgacactgacaattcctaagccaataatgccacactttgagcagcaagccatgtcccagatgcatttctatataatgatcaagcatcaagaatgttaaccttaaataatctggttcccgggaggtaaaagaatacatctccgccaaaccaacaagttcctgctaaaaaacagcacgagtaatcgtctaacaaacaatgcttccaacttccattcagtgcataccctcacctcatacactaaaccattcagcagagtgtgttagaatgattattgagagttgagacatagctttagtaaacaccattcttagccaaaaattccaccagtccctgtttcaccctgctgcaactccttccggcgctgctcctctaaaggatctggactcttgtatattctccgcatgcgcctatttatatgatgattgatgaaattatgaaaacttgtcaaaaataaatgttgataaatgttatagagtcaacaaatatttacacaacttccctcttttatccagactagagaattacataaagttattatttaataaaattgatccagcatttcctattaggtcaaaatacctgtcctgagcatgttgagcaggaaatgtaggcatgaattctttacttttggggagaggaacttcacggaaccactcatgatttagagcagcttcggcagtgatccgctgcataaaatagtaggtcttatattaatattcagaaaaatatttatttaccaaattaattcatgtagctcatgtaacctttaccttctcagggtcataagttagaagcttgttcaacaaatcaaatccagaatcagaaagaacaggagatccagtgaatgatgtggcaggaaactttttacgcaggaggttgtacctgaaaggaacattccgtggttaatacaaaatagaaaatttgttcaacagtacaagtcaccaagggaggccagatagtcagaccagaaccacccaaagttggaaaagcctgggaaaacagtggcaaaacataagcacaatataatcaaacagtaactttttaaataaaggaaatcgtaagcacttactgatgtttgacaaaattgaccttgactccaggtaatttggagaacccaggccaaattgtttcatttggtgtgccaagaatccggaaaatctacaagtagaataacaggtcaatagagtaaaacaaccaccaagtggttaagcacaagacacgcaagggttaaaaggaaagagaaatatgaagcaagagtgtaccaaacattacacataccttgtcaagttgatcaaactctgttttcccattaaacagtggttccttagacaatagctcagccattatacaacctaaagaccacatgtcaatggctgttgaatactgttttgcccccagaagaagttcaggtgccctgaaacatatagacagccattacgtaaatgatcgcatcactgcaagagaatttagtcaaagacattaagataaacaggtaaaatgaaggcaagtgcaacaaatgaaacaccatagtgtgatgacagactaacaggtattctcatatgcaaaagcatcgatgctgcataaaaaggatggataattatgtacatgtgaacctaaagtaacaactaattagcaataaggctactttattattattgcagaatagcttcaaacaaattttagttttattacaaacattgaacatggctatataactacatggtttcaaaattcattagaaaacctttaactatacttaaaaatgtaatacacatacagagaaatatcatgagaaacaaatagcatatagaagcaaattagcattcacctgtaccaaagagtaaccaccaggtgtgtatatggctttaaaggactcccatactgacgagccaagccaaaatcacaaattttgagatcacccctattatttagaagcaggtttgaagtctttaaatccctatgaagcacccagttgtcatgaagatacttcacaccttctaaaagctggatcatcaagcacttcgcttcactctggctaaaaggctgcttcattgcctccattagtcctttaaggtcatgttccatatattccatgaccatgaaaatactatcaaggctacttcctaccactacttctttaacgtcaactatggatgggtggtgaaaagaaagaagaatgtttatttccctaagagaagtcagtgggaagccttctttttccttctccatcttgaccttctttaatgctacaatttctccagtctttttatccctagccctatatacaacaccgtatgttccttcatctatcttgttaagtctctcaaactcatcaacacttctacaaccctgaagcatgttgactgctctttgaggttgagcaggaggttctggagtctcctggccatcatcttcatcttcagaatccgtgtctgagtgactgacactggtttcacttttcccaccttgagcatcaatctctgactcaataccaggataatcgtcaccactggaagttctcccacggacacctctttcttcagattcagatgatctggccctagctctttcaataccttctacattagattcctcagggctcaatagcttgttccttagtctaccatccaataactcaggagacaccttcctcctccgtttgggcatttcctcatcattgaggatctcaccctcatcaacaggagagttatctccagctgcccatcttgaggacgatatattgcgagttggaatataatcttcaccttctggatgttcagcttcctgatcattatcccacctccctttcgggggcgatgaatgcaaacctgaaggagagggcaaggtaaccttagatactgcattcaactgaagttcctcagtttccctgttcttgacaggaagtatttcaactccaccatttggaacattcggcgactgcgactgacggaacacctttggcaacggaggtggaggaggagaaggaagcgcccccttcaccacagaagcggaaaccctaactctggatgactcgttgacttccttgtcatcctgatcccatactatgggtgaaaagttccttttcctctccggcgctggtggagaccgagtcctggtttcttccaacatggcaacctcggagtctttcacacccggttctgattcaatagcatcatcagaaccactctcactggaaagttcaccaggctctctatcaactgccttgacagagaaaccacattggcgaggaccaaggccactgctgccagagtcactcctactcgaagaggatcgataaccaccaccattaacaccttccatctctttaatatccttctgcctcaccctaaccctatcccttgacccacccctcaaaccatcaccgccaccattcctaacacgatcgtaatcctctttcgaattcgcgaatccgccgcgtctggaaacttccaacttcgactcgcgctctctgaactcgttttcgcggtaaccgccatgtctgccagccgccatatatttctctatatacctaagtttgtgaattacaaaggaaaaccctaatcccccctttgaaacaatttttttgtatttttgtttaatagagccctaaacccaaaacaaaacgaatccccgagaattcaaaattgaagaacgcaaaagagatctaacggagattggagatgaaaggacaagataaaatcgagaaaatacgaagggggaataaaataggaatttaaagaggggattagaaacccgaaaaaattaggatcaggcgaagaagaagagatagattgatagggcttaccgacgaatgatgaagaaattggatattaaaagggagagaacgagggaggcaacgaaatggaataggcttagcgatgtgatgcggctgcggagaagagagagagagaccccttcgtagagaaagaaaattgggcccaaaagaaacaagggtgacaaaaaacggggatattatcgggacactccgttttttttttttctccaaataagataacctccttttttatttttaaaacatttaacttcgtatgttttaaaacaaaacatcatgatacagtatgggatagtcccatattttattcaatcaattttgatctcctcatattaaaatttgattctaaactttcaaaaataagtgattttaatttaattttaaattttatatacattttatttattttattttgatttaattgaactctaataataacatattcatttaaaatattattagtaaataatataattaaaaatatataaaaatttgaaaaatgaatcaaaattacatattttaaaaaatcatgagactaagtatttttattttaaaatttgatgatgaaaattatatattagatcaaacaggaggacaaaagttgtattatagcctataatcctttaacataattttgaatacattttttattatcaaaataatttcttgaaaattatataaattttgtatttttatcattattatgtgtgtgagaatgtcatttattagttaataactttcactaattattagtatgattatggattttaaatatgtaggcaactagtatgggtacataagtaacataataataaccatctatttctcgtactaaagtttgcttgctggtattggcaggaaaaagccaatgaaatgaatgaatggcattaattagagggagttggtgtatatggggaaaaaaaaaccttttcctcatcctaaaacaaatctgcgcgttcttttttcctcggtggcgtcacgatctgcgcctctccctctcttctttgtggtgtcgcgccgccatcacctccctggccaccatcgttgggcgccgccgccaccaacacattgtgattccacctcgagtgcctccgtagacagctctcagaaaccgtcgcgctccatcaccgacagcctccacaacgcagtattgtttcctaggagatcgtatgcaaccatcatgctaagagcgttgcttgagagaatagtgagagagtcgagaaaccacaccgtttcggcgacgagggaggtgtggttgatatatttgaggccgttccagaagccgtattaatagccgagggaggcgctcatccaggtgcaggtgaacttagcggcggcgcgatggggggtgcggtggcggagagggaggtgctgtaatgggagtagtggaggacctggaggcagttcgtgccggcgatggagcggatgtggttgtttgcggaggcgtccacaatggactgcaccttggatcgcgcgaggaggaggttggaggttgagggtgagggaggagtggcattggagggggaagcacgtggctttacaggcttggtggatctccacggcggagtggggatgggagtggaggaagaagaagaaaatggagatgcgaaagaggaggaaggtgggtttcacaggattgagaccgggaatgggaggaatatgaggattttagttttttatttttttaaataaaataaaaaaagtgacaatttttaacttactatattaaattaattatttcaaatttttaaaagttaacataatgcaatatttcaaaaagtgacaattgtgttttgctcatctatagatatttttatacaaaaattgtaagttaaaatttatcatttaacaaattaaccgaccatattttagatttagttttctgataaattctgaattatttttaagacattactcaaattacaaatctcatcgacaaaaagttgattagtattttaaaaaatataagagttttccttttaccactatagatcttcttactgcacaccaagagagcaagaaaagcatcatgtaacttgcaacattattgaagtagcacaattatgttgggctagactgaaaaggttttatatttcacacaagatattacatatatttggttgcaaaattgctactagcagcaaatggaaggaaacttaaagctgaaagagaaagaagaaggcacatgtcctgtccttcttatatactcaaccctttcagtagtcctcaaagctttgtcattcagcttcacttgtgcattagctcgtttctcttcagctatcctcttagtcgaagccagtttatttgcaaacctttcttgtgccaaagctttcatcctctcagctttcacctagtaattcaaataaacccatttattaaagaatagaaatggtgtcaagcaattttgaataattctgtttttgtttttaacctggaaatctcaaactgaaaacgagtttctaagatctatttaagagattatctcaacaaatgtttctataaaatccttaatcatatgtttagaaggcatgattatttgttaatcatatcacacattacaccaatgtttgttttttgcgtcagacagtaatgatgattctacatacacatcggcagacccaggattgaagaatagggggccaataatcacacaaattttctaaaaatttattttcatttgtcaaatacataaatcaaaataattaaattatacatacaaatatttaaattaattatattttcatttgtataacacatgaaaatataaattatatttacgcatacaatataaattaacacatgaaaataaataaataaagttcattttatgagataaaaacaaataaaactatcaaaacatgcttgttaatattacaatatgaaaaaagggatatgcactaataaactatagaataattttacagttaattacaaattatcatgtataataaatttgttaattttataatgactatcttaaaaattatatatgtttattaagatatgttatacacttctactaataaaagaattccaaaatttcaaaaaagtttaaattgaatgaattttcaaaaaacttatactatatttttataagatatctatttacattcatggaccggagccacaaagagaagcccacaggccacattcgatatttaacaaagcctttaaaataaagtaaaatcttatctaataattaaaaattaacaaaataaatcacttaataattaaaacatttatactaattacaaaaaattaaaaaatgagggggagggggacagtccccccttggttaacacccctgaaaatgcatgtttagtttttaggtaaaaaaaattcttttattttcatttgtataacatttataatttcaatcaaaacggacacaattgcagatgtaaaaactttaaattgtacgattgtatgcagtgaaaagcaactttttcctcaaaccagagccttactcgtgaaagcaatgcatgtctgctacctagaggaggttccatcagtataacataggaactatgaatcagaagagtactggtttgaacctatcaattacagagagtacttactttacttaaaaacccttgtgcaatttcagtggattcatgacaactcgagcgagtttcaaatataaatattttttctattctatattccctgcatcgggaaagaatccaggaagaaatataaaaatgaaagatcaaagatccctgccatgccatggtttcttttcaagaattattctctttgtcagtctatttcacagacctttcaactcttctctactcatgagctttttcccgttgctaacagggcatgaaaagatgagccatcatcttcagccttggaaaaggttaaaatcattgacaacagatcgagggaaaatggttgttgtactactatgccaaactacttttgggagtgccagtttcagaacatcttaataatagtaatatgctacactgtaagaacaagaacaaagcaagtaaagatggtacctccattttcttcatttccatttcagcttttcttatctgatgattttcccaggcttgaatcttcacctcttcacgcttgaacctaaataaagttttaacaagcaaactttgttaacactcaacaatttatcattaattcattgactcctaaggtccatgaaccgtcccataaaactaacctggaacatttttctgaacatgagtacaatttacggcaagtgtttaataattaaaataaactttagtattaacatactagaaaaataaaataaaaaatagtaatgaaataatttatatgtaaaatatgtcactaaaattgatgagtgtcacattttataattctgcactctattttaatttaaatctttcattttatttcactttcacatttatttcattcttttaaactaaacataccattagtgattaccataatcagagaaaaaaacaaattttttgttactaaatttgatcactaattgtttggtttttagtatttgatcataaaacaaggtcaatagcaaattaattacctggccataaatttggcacgttctgcctcatcccaagccattgcacggctttctagaggactaaattttctagcttgatgatcttcatgagtcttcttgcaagggcttgttgatccttgatctccacacttcctattagtgccattgccaccttcagcaacttgttgcaacccattttgacccctcattggagttgaagtccctgaatgaattgggcttctagtagcaggagttgtggctctaattggtgtcccagttcttgaaggctcttggctagcaatcggtgtcatctcagtccccatgtctctgaaacatatcggttgcacttggattgtgtttcctgaagacctattgtcattattattattattgtttctccaatttgactcatcacattctacccttttggcttcagcttcatattgagcagcaatagcattagcactaataatattagtcatgaaatcatggcaagcattattttcctcctcttccttctcactacttgagtaatcatgctccttctgtggcacaggagctatgagtctcaaatcatctgcgtttgagtttcttggcttgcttttggagtggcttttctctccaccttttgacaaccccacaagccatttttgtgcatcatcccacttagaaggggttggttttcccatggttgctcgatgatggtggttggagacacgagtagcatcttttcctttgtgaaaccctgagtacatggcactgctatttggggtctcttgtgttggtccattgttgttatagcaccctttgtcctccacgtatctcattctcaaagatttctctcacaaactcttaactttggcccaaacactacgcagggaaaatttcaggatctacaatttctgttccagatcctatatatggaaaagtcagtatgatctatgttatgtcttgaaatacctgttaacaccgttccatatatctgacgaaaaaaaatacatagtgcactggcatgtatatttaatttgtctttacaaacatgaaaaacagatccaactgccaaaatagctatgtaatgttaactcttgttgattcagcaaggagaccctaatgaactttgacaaatacttcagtctcaagcattaaaaattctgctgaagacctttttactaagctgaaaaagaagaactaaacaaagcctaatgtgcaatgtttgaaagcaaaatacactcactcattgagttaaaactttggaatctaaggttgttaagtgctttggaaatgtagtgagaggaattaaaacagagtaactgaagctgaaaatgtagttcacagagtaaagcttggtatttaagagaatgataccttatttcagagcatgaaattctgagagttgcagaggcagagatgaatttcagatccattgaacattataatactacccaaataatatgcatggtttcagaaaaaaggtttatcgttacgacaacaataaataaaaaatggtcagagggaagaaacatagatgcatagaatagccatttatcttgggcattggtggacttttattactgaacaatgcaggtgccatgtggggtggaatccacatttcatcttcaatgtaaggtggcagaggaatcatggaagtagtattttggcagagaatgactaagcaatatactatcatagattttttcctaactattctgcatttgagataaagttatatttaaaattaaaaaattattaagaaaataatatttgatcttaagtctttaatttactgtatctctaaatatttattattttatcatgatagtattaaaaaaaatattatttttaattctatataggcaaaacgaatattattaatacttgtaagaaagacttaacacaaggcgtataaaattcagctacggaaatttatctttaattattatttttttataatattctcatttattgatatattaatattacttacatacttaaatgaaatttgtaattgcattttaacttttttaatatgaatattttataaaaaattatattaattataatttataggtttaatattcattatatttataattatgttattttagtatattaaaatttaaaaattttattttgatcatttatttttttaaaatatatttttttaatctttttgctaattttacaataaaaatgtcacattttaaataattaatctaatataatcatttttaatcatcattatcttaaattaactatttaaatttttaaacaataatgaagagtaatgtttctaactgaaaaaaaagacaataatacattttgaaaacataaaaaaataaaagaaagaataatatttttaattagggtaaaaaatgatgataaataatgcgacagcaggattatttttggattgaagtgtccatgagatgtccactatgaagaaaaataatatagtactgtttcctagagacagcatgttaaaactttggttgtcctattaacggctactagattgagaaaaaataatataaaagggagacacgtggacggtgggatgtttgcaagaacatagacgaactgtgatactcctgattcctgaccttttcagttttcacgtgcccatgagagagagagccgtgcttccgaagatacggacagtttcataaatttgattgtttccacatgggtccatcttcaccaaaaactatcttatgccattccactcacaattactatcaatagataaataactcaccaggtgcaaagttaagtgtttgatgaatcactatgatttattcttataaaagatatgtctgtgggttgagaatagagatgatatttataagtaatctttagttttgactcttgactaatgtgagatttaatgactataacaacatattcgaataagatttaattgtgagaagagatcaataatattagttacattttaaaatcattaattatttttcttttgaaaaaactgattaagatattttaaagttactctcaaaatatcaaaacttggtaagtgagtgtaagttttaaatcacatggtgcaatgtgaagaattggaatagtatgggaccatatctgccatctgggaagtaccaactgacagaactggcatacaaacaaggaaatttcctctgctagaagaggaaacaagatggctctgtttatttacccatgcttgctccattcccccaacccaacaaacttagtggatttattttaagagtattaattaactgttctattctttctttctagtatctacgggactctgaaaggggttgcgagtggatcgtcattgtgttgtctagttggcgtgtgaagatagtaatgaattaacaaaataacaactaattagctactgttaagagaccgtatctaaagagaaggaacgttagtatacatacaagtgtatgagaggcagaatggaacgtaggtgataaaggtgttttaatgatccaattcaatttcaattacaacatccaatctaaaaaatataaccaaaacactgcaaaataaatgtttgaaaaaatgttgggttgatcttaacccatgttttttttttcaatccacaagtatatttcctttttggcttgaaaaagtgtgaaagaatgttccatgtctaaacatgtactaaatgtgtttggaaatatgtcatgaatgcaagtctagttaaatttttacgtcaacaacaacgcagaagtcagctactcattgtagcttctgccttaatgtagattgtggatatgatgttaggatgtgtttccaaacatatagtaagaaaaatttaaaatctgcataaaatccaatatttttttggataatataaatggaataaaattattatacacttattaacattaaaattactttgtcgcccttgttgatatgatgcgctccatatttgcaatgtaaatatgtttttatccaaacaaaattatttttatattgtttcgtattttcaatctcaatttgtaatattaagggagtctatataaattagttgactaagaagtatgagttattataaattcttaatatttatatttgaaacatatagataaaaaatctgaatttataatgtatataactatgattttattcataatttttaatcgtaaattagtgaaaaacaaacaaagttacgactgacaaaagttaagaattgatgtgaaatttttaatttttttatttgatttactagttatatcattgttttataatttactttattatttaaaatgctcatttgttatatcttatttgattgacaagtttaatatttataagtttttaaaaaattgaaaattaatccaaaccaaatcgacttaaattggattggataagatttggagaataaaaattcaaaacgaatggatgattaaacttaaaaatgattggatcatatgattcttttacctaaaaaatgttccaatccaaataagaaaacctttcgtttgattattttaacatttgtcttagttttttctccataatcatttgttgggtggtaaattgtctttgacctgaaaaaatgatccgagttctgatcaattgcatcgccctttcctctgaaaaagttgtcttagattgtgatgcagaacaaaatagacaccaactgaagggtcctcaataagaaaatatgatggcatgattggtgactatagaagtgccaaaatgttggccgaaacagcaaagtaaatgagtaagaaaaacaacaaaaagaaaattattagggaaacggataagatctaaaatgattggatccttatagatgagatatttatattcctttgagcataacaaaattggaagtatgagatgctatcaacaattatctccttcacatacattgatggagagatccgatcgagatccaagttgtgaagtacggtggttgagaaatttatggaatggaattatagcaagagaaaataattgaatggtaagtgtaccctggtgctgtagtctgtttgagatgaattagcaaaatttgactttgagggagaggatgagttccttatctggtggaaggtgcagtagttacaaccggtgactatgacaactttattactcatttaaaggttcagttaatattaggtgaacgcaatatgaaatttggacttgatatgatttgttagggattttttttctttattcgtagtttttgaaagcaatatattttaaaaaataaattttctaaaatgactcagattaaaataaaaaccttaaatatgttcttatttatgatatatacttgaattttgcttttaattcttgatataaaaatttattcttaagtattgttttagattcttacattagttaattgatgacgtaaaatatttgataatgagatttgtgacgactaaaaactaatacgattattttaaaatcaaatttaaattttaaaaaaaactgtcataatgaattaaagtaaaaaataaattttaattgaagaaaaaaattagagttgaaataaggatgttaagatagatgtatggataagataaaaaattgagatattcagaaaaagatataaatgatatctatatgtgaaaagatgaaagaacagacattgatcgaaacttacatgaaaaataatagttaaacaagacctaatggaatgaaatatagattgataaagagtatatcttagaacagagtagaaaaaagttataaacttagtagaggaataaacccattaacagattcccattatttctttattttaattattttcttcttcttttttcccttttgtcttatttcaacttttttttttcacttctctttctctttcaatctcttttatgatttatcattgaattcatatatcactaatttcatttaacttgaattaaagatgttattgatgttaaaaaaaaaaaaccagatttgaaaccaagcgaaccagaactaccaaaatattgtcgcaatcaatcatattagactcaagtttctcctcacaaaccaaaatcttaatcaaatcaaatacaacaacaaatcataaaaaatattgtcgcaaaacctagaacagagaaaccattaattctacaacattttcaccatgcagaatgtggaccaaggacaaaaatggggacgaagggcaccgtttggcgaaaatggtgatgaacaaatcaagatgagttcgacctcctcactgacattgcaaacgatggtagtggagacgtagaagaatcaacgaacgtctacctggactgggcggtaggggcgacggtgaggacgtcgtgcacggaggagttgcgagatcgagagagcgtctggaaccacaaacgcaccataccacaaaagctccaaatttttatatctaagttagatctagattgtgacgaaaggaggtggagtcagatctatggggtttcgagtgagaatgaaataaatgttaaggttgccagttgtcggtgataacaagagttgcgatggttgtcgcggaggtgcggtggttcgcaaggtagagaagaacacgatcaatttgcttccaccagagtcttcatgtcatagatctcacatcaccagaactttcgattgttggtggtgctatattgggttcagtggtgtcgctggggttgcaatgtgtggggtggcaggtttggatgtgggtatgtgttttgttggagtggagacaatggaataggaggtgggtcagcttaggacttttttttaatatatttatttgtttattttaattaattttggcagtttttaattataaaaatattgaatttgattttaaaataaatattgaaagattatgttatcaaataaatatttaatagatgcgtcattatttaaatgacagatattttaaaacaatttttttttttgtatcaaagaacagttgaaaggagtttttttttatcaaaaatcaaacataaaatttggatatatatcataaagattggatgacccctgatccaaatttgtcagatggtaaactcaatcaattctagacggctaaagggtatctttaccaacaaaattcttaagctcttcctttgctgcttccatcaccaccttaaagtctatatgcgtataccttcccctgtaatccataataaaatgttcaggtttagcactttgttctaaagaattatttaaaacctgcacaccataaaaaacaaaaataggagggggaaaatatgaaaggaacggttgctgctcactagattttcctcctctttttgtttcccaaacaaaagctaaaagttttgggacagcaaatcatgactaatgttggtctattgagatattgacgcatgtgtgtacacaattctaactaactaaacgcacaacagttcaaactcacccaatttatttcctattttcgagcagtattaaggtcatgaagtagaaaaaattgaatttcaatgtaccagaaatgagttttactccatgctgttgaaggataagctggacttgcaattccatgcattaccctcgcaacagctcttggtgtaaatcgagcctgtgaattgctctgcagaaagacctggtgatacccaaaggaactgttaagatttcaaaactttttcttccaatttttttttaagattattagaatgctcaaatgacagcttacctttagatctgcccgcaggaaagggctgcatatgtaaataccaccaattttagtacaagaaaatgtagcatataagtcataggttaaatttttgttctatagtacagagcttagctcaaagaaattagaaataacctgctttgaccgattttcttgcagaaatcagcattatcaactccagaaaagtaatccaatattttcctttgcaagcatggtgtatgattggcaccactgcaaccttgcatattatcacatatatttaatgcaaaatatgcagcattaaacattgcatccatttttcgtacctactcaaaaaatagaaccatgagaaaatgaatcaatcattgataacttggacatcaaatttgactacccaaacccaatggatgcaacgtttcatctaaaacgaatgatccgacaagtactaactcaaggttcagggtttctgattatgagaggaatacgggacaatgtcataacaacattacatttcaatttttgaacccccaaaaggaaaacaattgagcaaaggatacaacattctagatgaacatatttaaaaaaaatcccaaataaataaacatctcccaagtttatcagaatttacttaccttacaattttcaacttctgataaccatcgcgtaatatctgctgatagagataacaggtctgttgggacttcaatgatcctataacagtaggccaagtccttcatttcataagttatttctcccatcaactgagaacatttcaaaaataatgaggtcagattgtatttatattattgcttcagtaccacacacaagggtagagagccatgtgcctatgccaaatggttaggtgtcccaaatcagaatcagattagaagcatattttgaataaaaaattatgggcaagattaatctcaataaaaaaaaagaatgcactactcggctaaacctttccagatcataacaaaatatacagcttcagtgtattgattaatgaacgtatcatgtattgtgccgaaaattttcaagacaaggaaaactagcagagttttaagatgattacgataatcaatacataaatcacgttgtaagtatttatggctataatattataaatctaaaaaatataataactttgtttttctttcaatcacattcatcagtatgtaccatgagtactgttggctaattggaggtttaatgcagtggcaagtatcggaagcatttgtcctttggactactattcagaatctaaacttggtaactacattattgtattcattcccagtttcatttgaaaattttaagaatgacatagtgatatgaagatgtttcccatatcaaccttcaatcatagcatctgacatcttcccttgaagtgtagttactcagaagaaagaagacttgtgcacttttgaaacatatttgttaagcacacatgcgaactcaagaaaaaaatatatcccctaatccaaaccttcaggttgtacaactgatttgttaattccactgctgtaacccccatgtcatttgccacagttggaatatcaaaaatatattgcccatgcttgttttcagatctgaaaaatcacacaacaaagattcaattaaacagaagtatgagtgtaagtagaattaaacggcttttctatataacttcactttatagaaactaaaaatttggagccagactccatgttgaggtttacaacattaacataactcagttggaaaacagtaccatccagtggaaacagggggaaaggtgaaaggccaagaaatgtaatatgcttactattattacctttttagaattacagctatagcagaaaccttctgagcaagtaatggcggaggagactgcaatagtgccaaaagttaaaaatacaagcaactaaataattacggaaaccatatttagtttctagatttcagttaaaaattaacaaatagtagtataagattgagatgtcctatctgaaaattcaagtttaaatatatagatttagagagatggcactcaaatttatctatcttgcgtggcaaattctacatgcaaaggtgagtctggcacccaccttgtgaaaattcaaagtgcaagttatatttatctgtggatgtaactgcaggtactgtacatcacccaactccaagcgtgtcaaaagtgtaagcatcacctggtaaaggaaaatataggagaaatattttaaactgtagacctagactaaaataggcaacgtatgattatcttgagtttccttacaggaacatgtttcatttctagcatgttaaatctcatacaaatggatagagattagtgacccctatatctagatgattgtccaaaaagaaaagaatcttaatcactggaaagaatcccaccttagctttatctggttcaaagttaatcttgatctctttggtttcaagtacttagcaaagaaagataaaacaaaaccagattttttgtacaaacacagatatcatctacaatcaatatggcaaaaaatggcattttggcatagcatgcatatcctacagatatcatcctaatgacaaaaacttgggagctatccccccagcccctctttatttatcatcaaaatatcaagagaatgttatgaaatctgtctgaaattttaattgaaagttatttgtctgagaaattagacttaataaattaaaatgaatagtagtacagagtagaggacctcttctttcatatcaaacctgcgtgcagcagattctttgattaatgaacagattttcccacagtagtttttgtcagcaggaaacacttcacgcagaaatttgttcactgcatattcatccactccttcactgaggataaaaaaaatgcattaagaacattttgacagtgagaaaaagttaaaaataaaaaaagaatcgtattacctgtgtgttagactacgaagtttgaaatatatctcatcatcataaaatagatgacagtaggacaacctcccatcccttccagcacgacctatttcctaaaataccaattccctttattaagcaaagcatatgatagaatatcttgctatgctactactaaagtttagaagaaatcatatacctgtacatactcttccagactttcaggcaaactgtaatgaattacctaaacacagatatgataatggagttccagtatgaattactgtaatatgcaagataacttatattgcaatacaaatatgtagtgtgtaaaatacaagagaaaagtatacaagtaatgctcaaaaacttcattttttgaatattgaactattaactaaagtaactaccagtgcatttgcatgaacagagaccagggaaagagattagatgtccaagaccatgcgtccccattttgggattttaagcataaataaaaatcttttgaagaagaatcagttgttcctgatagagtcaggcttcaaaggtttgaatcataagacacatggaaaagcaggttaccatgcaacaagagcacaatgagaatcagtaaaccactatatgagcataccatcctagggaacttctattgtcataaaccagttcatgcaaattaatgcagaaaaccataacatgttgataagccttacagctccaacatctcttttatctagtcccatgccaaatgccactgttgcaacaaccttcataaaaaaatacaaggtatcagttggctaaaaaataaaacaagcaaacacaaagaatactagtatattatccctgcattgcatggtaaaataattaaaagttgctaaattttatatatagttgactgtataaaaaaatgcgtgtcataaattcacaatattaatgattgaaccatagaatttgtctcaccactctgatcttgttggaattaaacaactcctgtacatagctacgttcctttgcagtgataccactatgataactctacatggtaaatcacatcaatcatcagatttaaccctcagtgtcaaatatacagaaagacatacaatgtcaaaaaaaaaaattcggagctaacctttgccaagatattgttatcattcaaatatctgctaatttgatcagtttcatactggaacaagaagaagcatcattaattcccaccaatatagaaacgttacaatagattcaattatccactatataaaaccacattttaaatctgagccataaggatctcactaaattttttcagccaacaatattatacatatcaaatgctctgagctagaagcaagaatatattgcaatacaataacagttgagtttaagaaaccatagaacatcctgtactttaaagttgacaaaaaccagtccatatacacacctgaaatttgcagtatatgatgatgctttgaacttcaacaaaaggaggagactttatcaaattcagtaggtctttcattctatcatgatcaaaatgttcaacgtatataagttcattgatgtataagtttaacaaagttgaaatgacaaaagtatacaagctgaagcagtaaatagaagcatgtgacttgcctatttctgaccatggatactgataaatgaaaattgtcccttaactgcgccttctgaataagatttgtggaaggaatatctagagcagacatgatggcatctaaagttgtggttgtagcagttgccgtcatagcaagcacagaacgaacattaagtgtcttatgaagcagagatgctctaagtctcataaaagatggtcggaaattgtgagacctgtaaaaatgttcaaaatttcaagatcaaccaaaaagcagattaatatcagcaaaaaacattggaattccctcaccattcagatatacaatgtgcttcatcaataacaacaagtgagatggctggcaaagaagaaatagtagacagaaagtcctcattcagaaaccgctctggtgaaacaaaaagcacctatataaattaaaatttccaacattagcattagctttatgcaagagtactaccatcacccacagataaacctagaaacacaacatgtcatacaacaatgtcatgtaaacaatcaactccattgtatgcaaacaatctgcaagagtgctacacaatttgagccaaagttgcattcggaaattcagttgttgaaagtcctacctttatccccccttgacgaagctgcttgagtgattcagaggcttcttcaggtgtctaacataagtagacataaaaagatgaattaaacatgaagaggtgaaatgatgatatcctgtataacaataagcacttataggactataccactcgctaagatgctaactagtctctcatccaaaatccatttaagttttaaaaattattttcaaaacaagtgtttagatgttttctattttattctattttcatcttattcaacatctcccttaatttcagtgtctgttttgtacctttccaccagttgtccttgttatagttgtattttgaaaattaaagacagtttttgaaaatagaaatcaaatacaccctaaagttctcccataaattaaaaattaacttatgcataagctaaaatcagtttttgaataagttaaatgaaagagtctcaataaaagttaaagtcaataagttgattttaccttatgtgaaaaccttaattcgttttacccttttattattatttttttctcttacaagtgtttattgagaattttatcctatcaaaatcaattaaccaaagtatataataacactgcacaagggagaatgtataagagtttacaacacctgagtgctggatagaagaccacccttaatcacatgaggcaattgccttagctgatcaatcatcaaagccaccaatggactaacaaccaacgtaaccccaggtaagatcacagcaggcaactgataacacagcgacttcccagcgccggttggcaaaacaaccacactagacttcccagcaagaaccatcttaatcgcctgaacctgcccatctcgaaaacaatcatagccataaaccaatctcaacagcttcaccaaattctcctccgaaggctcgtcacgtgcggcggccgcagcctcctccaccgcatcgccatcgatctccctactcttactaccccctctctgcttgaattctccaattgcctcctcttgctcctcctcctcctcctttttgggctgcgatttgaacctccctctcttgtaccttttcccgccaattttccctctcttgttcaggaacttctttctcttgccattcaagttgagcttcacgaagttcccatcgcctgctccgcttgttcgcggcttcacgctcggtatcggagcactggagccgatcaggttgggaagctggctctttctgcgtttcctcgggtcggcactctcggcgcgtgaatcagacacgccggaagtaaaaaccggttgttcgatttcagaaggttctagattgaggagaggtcttcgaatcttcgagaaggaagcggagagggaggaggagaagtagccggcagggagggtttcaatggagtttgaaatcgacggagcgtcggaaggtcgccggatttggaaggggagatcggtggggagggagagaagggtgccttgctggaatgggtcgggtttggacagggttttggaggatccggtagggttcggttttgattttgattttgaaggtttgattctgattctggatttgtttgaaactactacaggtggtgatggaattggttttcttggaggagtagtggagatgtgagatccgtcggagtctgaatcggactccatttggattctcttggatcggaacacgaaaatgaagaatggggaaggaaaacaaaagaagatcactgaataaaagctagctcccgccaacgcgaatgttcccgccagttttgtattttgtttttttaattgttcgagctcgggttttgggcctattggccctaatcgggtcttaaggtcaccattacaggcacaggctacggtggtcacttaaattccttgtgttttgtggtcaagtttaaggatggccgttagatttatgtttttttatattcgaagactagatttagtccatggacgtgtgtaccagttatttgttttttttaatgattgtgtgataatttacatgtttggccttgttaattattatatatttttaatacaaaatctgaatgtaattgttaagtcaaatttacccattgttgattgaatggtgattttttttatttattaattattgaaaattaaatgtttaagttgtgttcgttaagaatactgatgtagttgagagtgttgatattggtggcggtgcaatgaatgtgatgtaatgaccattttagatcaacacgtatatgggctttacaagaaaaacaaatctttaaaaaaaagaaaagattttcccacttggaagaaaatttgagattttaaaatgttaagattttactaagaattttttctaacttctcattttattactaacaatattatataatggtatttattaaaggcctaagatcttatctagtaacatttgtttggagaggatccatcttaaaaggaaataaacacaagaaaaaagagacattgatcgatatactaaataatgtaacaataaaagaataaaaattgagatggggataagatggaagagaagttggatatataacaataacaataatccagagttattaaatcgcctattatccatcatgtcacaaaagacgatttccttttagccaataaataaatgaaaaatgtttgtttgcggaaattcatgtagtatgaaaagtgttatacagataaatgactcctgattaatagaatagcagaaacaacgcatgtactgataaaaaaaaaacacgtgaaaaatgttctcaactccgaactatgacactacaaatcgaaatgcatgtttgaatggtatcataataaaaaacagcaacaacaaaacaagaacaagcacaaaactaaaggggctgacctcccaagtcgatactcagaatcaccaccttcgatttcctacaacttgaaagacgcctctatttcaacccaatcaacatgacggagtactagaaacgccaacaatcaaccttcttcaacgaaattaatcttcaaaacagaaccctacaaagacaacatagggcttatctttctgcctggaagggcaaaacagtatctcaagttcgtaaaggacattctcgtctttctatgttaacttaaatataaaaaattaaatttttaaatacggacccacttactatacccagtttgtatttccttgaccacaaaggaacttaggtgactacattgataaagaatatttatcaattttattaataattaatttttattgaagaatttgattaatcatttttaataagattttttttttacaatcatattttttttatttacaagacttaaatccgacagtttacttaagataactaaatcgattacctctccacaatgacttgttggtttgattgcagctttagattgtgttatttgataacaataaaaaaaaaaaacttgtttttgcatggttccatttggtctgcaaccgaaaaagcttttggtgggtttagggttgctgcaatggacttatcccttgttttagctgaaaaaatagttgcaaaataagctgattgatgaaagaagagagggaaatgtagcttttaaaaatgtattgtatactttaacagtttaagtgtttaacctctttctctcatcttaaactaatctaaagagttttaatttaaaaaattgtcatacattttctacttcatttttatatttcttattttaaaccttaactttaaaacaaattttaagctaaaaaaaatactaggccaaacatatcgcatgccatatcatttaatttttcctatattataaatcggaattctcttatttgaataagaatgtttttagaaattattctcactctcattatcataaaattatatctcaaaaacttaaccagaagcatttcaaaaatataccatcaacaatagttaacgttagctagtacccaactcctattttccccggtggaaaaacaaagtcaacccaatttaattcacactgatatgttatttcattcatatttttcttttctttctattgcttttttataacaggggaggaatgatgcacatgaataaacttctagcaaagaaatcagaatgcgtttcacaatattaacgaatatgaatgagttatacttcacacttccattgatggatcatcatctcaatggaaatcaaataacaagaatggagcaacttgaggagcacaatcctccaattgcctcaaattaatggcctacccacaaaaaaagaaggggaaaaaaaaaataactttacaattatgttaaacacaaagttgcatatcttacgatatatattggagccgacaaataacaattggctattatcccaaacagccataaacctaaagccatgcgcaagcatttggctaagctctgctctggtgtatatataggccaacgagaagagaagaaatgctggcacaaattataagggcaatttaaactttgaactctcacattatgatgcaattacactttgattcaagcttatctggaagaggcttcatgttgtctactttgttaggaagcccaacattgagtgtcgaagactcggcaatattttcatcattctcagccttggaaggggattttacattagtttccaccatcttgggccttgccgccttctggggtttcatagcatgcttgccagcagttcggctgcaagagtcctttgtatcggaattgggtttcgccaatatagtcaccgtcggctcagaaccttccaatggttctgagtgctccttttccattgctatcgttgcagcctgatatgcaagatcatggatgacagagctgcaaaaaagtatagtatttgttgcctcttcaagtgtcaggcttctagtatttcctctatcttgacactccaacgtaactgtggatctctctggcataaaccattagaaatctgtcagaaatttgccaagtactaatattttctccaaataaagctttagcggataaaatatattacaagcactaaagaaaccatgtacaacatagagaagcagaatctcttttcaatagaaaactgaagcgaacttatcctcccccactaataataaagtatctgatcagatttcagaaagctcataaaaagatagcaaaatacagccacaatgttagtagtataaaacacacaggttcctgtttacaagtgccctaagggcactggttatggaatcaataaataaaatgtttttttattgaatattacctaaggttgcattgggaatcatgggggaatgcattgttacactttctaataaagaaattgactactgattccttaaccagctcccttggttagcgtttgccaaacaaaaaagttaatccaaacacaatttttaactgataagctagaaactacactactaaattgatgctgactatcttattcaacataacgatatcctaacacatcaggcacttcactcaagagtattatccctgttataaaaaatatgtcaagaaaaaacctttcaaggcatcctaacctactctcttagaaatcaaaactacaaaatttgagtagatcaaactattaatatcagatagagcaggagaacctagaatagacagtcattctataaatttatgtatccctttaaattgccaaaaattaacatatgacaaactgtgtgtgctatggacgagtgcattgagtgatacaagagaataatagaagattcttatagaaaattttcatctcaatcatcattggcaatatcttctgtttgaaatttcatccaacaagcatcatacctatgccaagggagtactcggaggcatggagctcagaaatagaagctgcaagacaatcactggaagaattaggaacagaatgttcctgaaagtcatcaatggggctctttgacaccagcgatggatcaacatccaccacacaagtatccttctgacaacagttttccacttctatttctgattcttcaattgtagaagtgttgatagttaccaaagcatccagtccatcaacattagaattctccatatcatgtttcttgtcaaaggatgactctggatccttaactgatgtttccatatttaagacactgcttacattatttgggtggtcttcagtactatcatttgaaatagaactcccatgatttggaaatgatgacactgaattgtcgccatgctgaacaccagtagcttggcttactaactctgagctccaagcatcagttgttctaactaccccaatcatgatattcaagattatcttccctgacaacaattgaacccatattggaagaatcaatcacatctgtcactgcattttctgaagcttgcatttctagtagatcttgaggtattttcttcaggatgctgcattctgtattgccagaactttcttgtgtagcaaaacctaatccatggtaagaatggtttgacattcgagaaaaagataaaccagggcttggaggcctgatcctaacatcatatccatagtctacatacaatttcctgccacttgactgcctttggacatgaaaatcagattgtcttgctgagctaaaatcggcagatgatgaggtagaataactgctacgcccagttgagcttctaatactgttaatgcttcttcttgcaaaagacagatcatcgtaagatagcgtcgtggcagtaaaagtccggctctgaattacatgtcctttgctactgcttgaccttttcaatagttcagaaatgccagtgccttccaagaggtccactttcaaatttgagcgatcgttggaaagatacaactgctgatcaccagaatcattatcaggcttcttgtaatcaacccctgactggtccacctcaagctgattggcaggcatctgcccacttctctccaccagtgaactggagagagaattttgttgtgagtggtcctgaataaattcactgggaaaaatttgactttccacagcatctggttcagcaaggggaaaccttgtgttacccacatcagtctcttgacgcagtttagacacaagagttagttggtctgtttcggctgatggtttttcttctgcagggatgttagtggaattcactgaattgtcactggaaacttccaaatttgcctccgggatgacatgtctcaacaatgtggttttcctgctacattctggacacagtctaagattcttctcagtttgatctgtggcctcaagagggaaaccacaatgggaacaaattgtattctcgaaaccaccagtttcagaaatgtcacctatgacattgaaagttgctaaactttcattgaattctttgtcaataccatgattagaagaagcttcagattcagtaggacctaaagcaatcacagggcctctagttttggtgtgcaggatgtcagctgattcatcattgatctcatgcccaatgtttgtatttaatccatcaattttatcaaaggaacatacttcttcacaaatatcagtgtataatatcttctcagtcgcacgtgccacatcttcttgattgtggtcactcccttcagtatctggcgcaaaacttgtaccatgatcagagctcacattgctgcttgttgtgacagaggagttcctagataccagggaacgttgtgcagaatttgcttttccaacatagaaggttgtacttggcacactagataaaagaggcctgaacatgttctgaggactttttctatcctgcatagcattgtgagtaagaactaagaagtttgattccaaccaactatttgaagacataagagaaaaagatcagggcaaaaggtgaggggaatagggatgactgaacaagtttttacaagaaaaactcatgactaagaacagaaaatgtgttaaccttgttatgataaattgataatcatgtaagtgtgtgcatgtgattttatatgtagcacaataagcaaactcattcatgactttattgaagccatttatttgaataattgtcttctcatgtgtagtttaaaaataaacttactgaggaaagaaaacatgcacacaagaggaaccaaataaagcattgtacttaaaaaagattataaagagagaaataaaccaaatatcatatcagagttttgatcattggtagcctagaataatctaggatggttggttcacaccactttccattgtagactgctttgatttcaacagaaaaacaatgttctaatttattagcatatatcaaaaggaaagtgcataaaggaagaaaattgtgtgcacggcatgcatgtgcagggccagctccacatatttttaggcttaaaacaaattttgatatagccaacttaggaacatcttatgggctaaatttggtgagaattgatatattaagaaactatctatttaattgaaattaatgaataattaatttttaagtgagacagtaacaaaaaattaaggacctaaaaaaaagtaatttttcttccaacagggttcgaacccattcaccaaggacaaaagtgcaccttaattaccactaaactagaccaactagcaataaaaattataaatactaatactaaacaactttttttctgaagggcctaaaaaaggacttggcccgccttatgcttgggccgtatctgctcatgtgtgtgtggaaaatgagtgaaaaagagtccttggaagaggaagggcaactaccaaataggaatattcaagatttatatggtatgatcacttgccagcacattagcagcaaactatggaatgattatgaaaggaagttaagagattatgcaacaaaataccatttgctggatagcagaatcaaaagatcttttaggagcagaacttggggacaccatcctggtcgacttcttggaaattgaaggagatttgctgtttgaaaatgaaccatcccttcttgaaccaaatcggtctagactacccactgggatggactgaagagagtccagatcatcatcactagaagatacaactgaacctttgctgtgtgaactaaattggtctcgatcatgactacgaatataactggtgctcctggaaggagttggagacattgattgcctaccaaatttagaagtagaatccctactatttttggatgctggagatgaacctctcacatatgatgctggttgatcagccaaagaggtacggagattgagaggagcttcagaagagaaaccaggaatattagtttgccatgctcttatatttggtgaagcagagtttccacggcttgtcttaacaggggaagttaccctaatccccaatgagaatgcaggactactggagccagtgctgattcgctgaggagtaggagtggaaggcctaggagcaggtgtcataggcttagttggaggtggagatggtcttcttgttggagtagcatatcgtaaaacttgagttggactaaaatttggtgttgatgaagaccttcccctagattgcgatatattattcccagaacgaggggatgaacttaaacgacttggacttgcactacccctactgcttttgtaacttctctctgtctgaaagaggacatccaacaaaagatagataatgagtcaaacaaaaactaaatttttcataaagaggagaaaaagacaaggaatttttatttaagaggcatttgtgcataaaatggatttgaaagcacaccgtagatgatcttgatatggaaataggtttactccttggccttcctctgcttacaacatttatttctggtggttcatcatctaaagaaggaaacagtggtgtgtccggtggtgtcaataacctttcaatgattaaaacagaaatgctgcatcagcaaagtaatatgcacatctaattctcaacctttgcgaaaaagaaaaatgaattattgaccagacaaaatggtgcactattaatgtgaaagaaacataattgcaaacagttggacttgaaatcattaaatttgatcatacaacacaaacgcaatttaacaaggaaaaattcaaaagacagaaaaggctacacaccaatcatagtcattcttgtcaccatctgtattaagcaattcactggtttctcctcgaccgggaatggatatcccaagcttgatatcaggaaaatctctcaacttcgatgctgtaaattaatatccaaaacaaaggggagaaatgcatgagtatcacccaaataaagcaaaaaaaaaaaattacattctcttctcaagatgagagtaaaaaaattacaaattgagtcttctaagtcatccgatggctgaagcaaaaaactctcttcttctctggactgcatttcactgaacaaagcaagatcatcatctttctctctcaagggcaatccgctttcaagactgcgcccgcgcttgtgactgtctgatcttggctctctgccgggagagcttctaaatgatagggaaggtggcatctccactacccaatgcagtgtccaataacaagtgtcacctcaagttctccatacaatccaaaggcaaaaaccttcaacaccctaaccaacaaccaatgattattaacacataccacaagctcacgacaaaattcaatctccaaacaacaatatcagcaaaacccactttccttcgccataaactctctcctccggtttcattactccttgtctaaacacttataccatacccaatgtgactgagtcaaccaacccacataccccaaaataaacaaaacaaaatttggcatattaaaacagtaacaaaaacaactgtaccattcaaaacgcaatggctaacactcctgagcactcatgcaataagcatccaaaaccaatattgaagatacccctcaacctgaaacccaagaacatttgccagtagcaaatcccaattacgccgttgccattaccggccaaaagggtagcccattcaaacggcaaaatttaggcttgagcacccacttagccaagttcaaggcacacagctaaacttggttcaccaaattctcacccaagttcgaagattaaaaaacaaaaaataaaaataaaaacaaaaacaaaaaaatagagcttaaatgccaattacaatgcgacgaatgttgtctcagacacccggttatacagcagcattcatggcttccagagcaaccaaaagtacagatcagaaccagtgtgatccaacggttccaacaaactctaaaaaaattccattattctctctcctcacaaaatcttttttttttttcagttctgaaaaaataagaatattgcactgcaatttgagaataacaatattaatactcaagtactcaacgaaaacctttgttgttgtccttcgataatttcatttgttgttttttcctaaacagcaagcattctttccctttattttttttttctctcttaaccttttcttttcagcttccttttcatttttttcctgcggttaccggtgccctcgtaaattccctatgatttccattttttttaaatcttgttttctagttttcataattttgtgtttgcgtataagaattaaaatgctaattagtcgattttgatgttttggattttacttctacttgttattatagcttatgaactgttttctacctttttgattgccaacataaatgggattgaaatttcaatgagatattaatcaatattcataattgtgctggtcgaaggttatgttatgtgctgtgtgaatactccgttaatgcttacggtgttactactaatattactagtacattgaagccaagtttggacttttggacccttcatctcgtgaacgccacaagtaatattaatggcgttggaatttattggggtcaatttttgggactaagctattaaatttcttatcacactcagtaaatgtacgtcacatagatccgtagagcaaccaatatgttttgacttgttgaataccctaaaaggagtactatactagtagtaaaattcttctaaatttcaacttctaaccaatggacaaaataatggggttttataaagattcgtctatttagcattagcataatttataacaatcttaagacgctgcaaaagacacccaatatgtgtataataaagtccatctcacgaggactgaaccatcacgatcaggggtatcattttggtgaggttggcattttaaacaagttgatatgtcctaattagtttttttgtggcctaaggtttctatcttattttataaaatagtgcgtgaattggtgacaaacgaaaaggccaagaaagaaaaaacttgagaggaaaggaatgaagacagaaaagagttgtgtggggcaacgtaggatgaagtcaacttaactgagttatcattaaccatagctagctgagtacactaatgcgaagattgtcgaatcatgtcactttaattggtaggtgatgaagattaccaaacactaatgatttgttttatgcctctatctcgtgtttggtcctaaacacactttcccaagcctcgtttaactctgccaacggtcgtggacatttgtttttccatcaaatacaatacaatagggcagagaaaacaagaggcgaatgcacaatattcaccttttcaaaggggagcttatctatgctataaactactgtactagtgagaaattgagataaatgcataaaaaattatattcgattctcattttcgttatggtataaattattttttttttcccttttgttgaggtgtgagtaaatttttccaagtctgagaaagagaaagcctatgtcatattattgaatgtcattcgatttgtaatcataacaaaaggtctataatgataacaaattttagtaagagttatggaataaaagatcgtttttgattgatgggtcgatcaatggtattttgtggctaaatcgagagcaattacttatatgttaatttagtgatgatttgagtgcaatgatccatatattgatattagaatcaagtgcagatattgtttggagaagtttgaaggacattcgaatgcatgttgaaatgaagacttgattgtcaatttgaaagaagtttgttagaggttaaatattcgtttcgaatggatgattgaaacattgaaattgaataggagatttggaggatgaaatacttagaaaatttcgaagtattgatgtttgaaggtaaattcatttgtgaggaatattctttaaagatgtagaagattcaaagaccaatgaactcatactaaagacatgtgactctcaaacatacatataaaaacaactattagcaatttgtggataaaagtaacgtagaagacaaaaacaacatcttaaataatctattcaaataaattattcacatgtttatctaatataactgttatatcaataaacttataaataaacataataatagtcattttttcttaattaattacaaagattatacaagttttgcatacaccatcatgcaaggaaattactatcaattataggaataatgtgtaagtttgaacaacatttcttctctaaacttacttttttatttcattttcactttacttttcgttcactttacatttcgtttacttttcattgcatttaaactttatatttccttttgttttcgtatttgcattcttgttttacacttgattatatcttttttaagaacatttgtcacataattttctgattgcattattattcaaagatattatgttttgaattcgtagttgacaatatctttatttttggagatattttgattttacatgacgttatgattatattaattgattattcgagcaaattctgtttcaaattgatatttaaaactgcatttatatacttttttagtcgaatgcaatttttttttctaaataaccatttcgaatcacttaatgaaacaaaattttattcaaattaaagtaagatatttctaaattaaatatcatatttatttgaattggaagttgttgcattaaaaaaagttcataatttaacttctaagcggtgttttaaaaatcgatgactgatccgattaagatggatcattgggttggtcgttgaataggtgaatcattggttgatttagtcaaatcagttgatctgcataacaataccttaaaatatttataaaaaatcacaaattaaaaaataaaagagtgactctctcctataattatgaaatataagtaattcattacctaatatgtaaatatcatctcatcttttaaaaaagatacatcggtaaacttctataaattaattaataaaaaaacttatttttacatacaacaaaactcatattattctttttctcttattttctttctcgctttttcttactctttctctttagttagttaaatgcaatactaattcgtttttgcgttttactacttcctttactagatttgactatctgcctcacaacttgccataattattgcctctcactcacactcccattggactgctccccaacggcccccacaacatcagcggccggacaccaatgtgaggatgtaaattggactataatcacagtctagcaaacaagaaatggagttccgttgcctcttgcgaggtgtcgaacccgggtcttacccctggtatcactccctgtttgccagctgagctacgcccaccggcatctcacccatcatttaatgtccacatgtcttcgccccacgtttcatttcatacaaatatataaaggctgtaacggagattaggagattggttaagaaattgttaaataataaaactatttattaggtaaattaattaatgattaacatttgctataaataaatattaactattgtctttggatatttattaaaaaattaagataattttttattaggatacataaaattatgatgtttataaattattattaatactcatatatcgtctcaataatacttattttagttttttaatcgatatcattaattagcaaagactcataaataaattaccataatcaaatttttgtgtctctagtatattttaccttaaagattttaaaaagattatgacagtagtgtgttcgtgttgtactagcagtataaacattaaaagtaaggcagcttttttcctctcctacacatgagtaataattgctacctacagctatagacttactccatacacggtttcctactttcttctttcaccattcattttcctcttctttttggtacagctactactgcttcaacttcttttcatctcaatctcaatatcttctctcactctctttcagttctacaaggttgtattaacatgggaatcgaagaaaaagcgggagaaagagatgcccagatgctcaaaatgaaagcttccgaaagaatctgatgccaaacatagtggcaagcaatgatcacttttcttcgttaacgaaaaaatggaagcgccgatagaggtcgcgacgaagcctcaagctgttgtgtttggtgagatggaggtcgcgtagaagctcaagctgcactgctgtgtttgttgagctcaagtggagaaaaatgaagcttatgcacaacccggcccgggttgacgggttggcgggtcgacattaacccagccgggtcgtccgggtgggagcggcccactgtcattggccgatctaattacgcaccgacccgatccaatcttcgatttccggttggaccggcggggtcggtctgagtctgcaaactatgcttctaagtcttgctaaataaaataagtttgtgattgattaaaataaaaattagaaacttgaaaaaattagagtcgaatatccaaacaaatttctaccataagcaccctttaagatcaccttaaggaataaggatgaaaatcttcacattttttttaaaaaaaggtaaaattaggacatttctggataaaaaagctaaagattgagctcttgaaatattaagaattatttaaaggattaattttcttatagacacgtgcttcccatcaaaaccctaaccatatatttagagggtataattatttgtcaaagtcatcaaatttacaatagatgatggatttatgatcggataatagtgcaaaatctttactattaattcttacttcttagccttttttttattcattcattttcaaaataatattttgttttttatttatttgtttacttaaattttttaagtaataattataatctttgtagttatatattaattactaattaaattttaagtatcttatttatttatcataaataagaaaaacaaaagtagtaagatttaaaaccacattgaactaacacaccgttagcctgcatgaaactaaattcaatctctttaattaattaaggttttaagtagtaatcttgtgaatgaagaaaaatatatggtcaatcaaattctctagtggattagtcataagtaaaattagtgaatacttcacaccaatctcatgacgacaataaaaaaatgaagcattgaaaatatttaagaagaataaggagatcttaattaattattttattttaaaaatgagaggaacaaggagtaggtcttcaaaatgctattttgtggttttttattagtagaaattgaattcaaatacaaaaaattcataacaactcgcaatactatttaattaactgaattatacctcttgaatactattgtatgaatttatttgagtttagtggatatttattgttagtattaaaaaatttccactctcaattaattataaatgtaatatcttgaattttaagcatgtaactaagcttagattaagccggattaagcataacattaagaattataaacatgctttagaatcctttgaaagatgctttaatatgcaagttataggctgttctggcctgcggcgcgacccacgtgaagtgcggcgcgacccgcgccatatgtgtaaaatcagggcagagggttctgccatgccacgtgtaacaccccggacgtgctaacattaatgataccaaaccacgctaaaagcgttatgcatgcgatgtgcggaagcgacaagatcgtttttcttgattacattatgtatgaaatataaaacacaactaaagcataaaacagacagaactgatccagataaaacatacacaacataggcagatacatactatacaaatatactcaggagggaacataacatacacaatctcacaactgtacatatacatgctcaaaaacatgaccacaggcggtcatttataaaatatgtacagactcgggtgtacacacaccctgctctaagccaaagctaagaccagctccccctctggaagctccgcaccggtcttcaactgcagcctctccagcctgtcacctccactagggcctcctgccctgaggtcgcttctctgcccctgcagaagcacctgaaaaccacaaaccccacacagggtgagacatacgtctcagcaagctcagggtcctgggaaaacctccctcaccctggtttaccatcaagacatnnnnnnnnnnnnnnnnnnnnnnnnnnnnnnnnnnnnnnnnnnnnnnnnnnnnnnnnnnnnnnnnnnnnnnnnnnnnnnnnnnnnnnnnnnnnnnnnnnnnnnnnnnnnnnnnnnnnnnnnnnnnnnnnnnnnnnnnnnnnnnnnnnnnnnnnnnnnnnnnnnnnnnnnnnnnnnnnnnnnnnnnnnnnnnnnnnnnnnnnnnnnnnnnnnnnnnnnnnnnnnnnnnnnnnnnnnnnnnnnnnnnnnnnnnnnnnnnnnnnnnnnnnnnnnnnnnnnnnnnnnnnnnnnnnnnnnnnnnnnnnnnnnnnnnnnnnnnnnnnnnnnnnnnnnnnnnnnnnnnnnnnnnnnnnnnnnnnnnnnnnnnnnnnnnnnnnnnnnnnnnnnnnnnnnnnnnnnnnnnnnnnnnnnnnnnnnnnnnnnnnnnnnnnnnnnnnnnnnnnnnnnnnnnnnnnnnnnnnnnnnnnnnnnnnnnnnnnnnnnnnnnnnnnnnnnnnnnnnnnnnnnnnnnnnnnnnnnnnnnnnnnnnnnnnnnnnnnnnnnnnnnnnnnnnnnnnnnnnnnnnnnnnnnnnnnnnnnnnnnnnnnnnnnnnnnnnnnnnnnnnnnnnnnnnnnnnnnnnnnnnnnnnnnnnnnnnnnnnnnnnnnnnnnnnnnnnnnnnnnnnnnnnnnnnnnnnnnnnnnnnnnnnnnnnnnnnnnnnnnnnnnnnnnnnnnnnnnnnnnnnnnnnnnnnnnnnnnnnnnnnnnnnnnnnnnnnnnnnnnnnnnnnnnnnnnnnnnnnnnnnnnnnnnnnnnnnnnnnnnnnnnnnnnnnnnnnnnnnnnnnnnnnnnnnnnnnnnnnnnnnnnnnnnnnnnnnnnnnnnnnnnnnnnnnnnnnnnnnnnnnnnnnnnnnnnnnnnnnnnnnnnnnnnnnnnnnnnnnnnnnnnnnnnnnnnnnnnnnnnnnnnnnnnnnnnnnnnnnnnnnnnnnnnnnnnnnnnnnnnnnnnnnnnnnnnnnnnnnnnnnnnnnnnnnnnnnnnnnnnnnnnnnnnnnnnnnnnnnnnnnnnnnnnnnnnnnnnnnnnnnnnnnnnnnnnnnnnnnnnnnnnnnnnnnnnnnnnnnnnnnnnnnnnnnnnnnnnnnnnnnnnnnnnnnnnnnnnnnnnnnnnnnnnnnnnnnnnnnnnnnnnnnnnnnnnnnnnnnnnnnnnnnnnnnnnnnnnnnnnnnnnnnnnnnnnnnnnnnnnnnnnnnnnnnnnnnnnnnnnnnnnnnnnnnnnnnnnnnnnnnnnnnnnnnnnnnnnnnnnnnnnnnnnnnnnnnnnnnnnnnnnnnnnnnnnnnnnnnnnnnnnnnnnnnnnnnnnnnnnnnnnnnnnnnnnnnnnnnnnnnnnnnnnnnnnnnnnnnnnnnnnnnnnnnnnnnnnnnnnnnnnnnnnnnnnnnnnnnnnnnnnnnnnnnnnnnnnnnnnnnnnnnnnnnnnnnnnnnnnnnnnnnnnnnnnnnnnnnnnnnnnnnnnnnnnnnnnnnnnnnnnnnnnnnnnnnnnnnnnnnnnnnnnnnnnnnnnnnnnnnnnnnnnnnnnnnnnnnnnnnnnnnnnnnnnnnnnnnnnnnnnnnnnnnnnnnnnnnnnnnnnnnnnnnnnnnnnnnnnnnnnnnnnnnnnnnnnnnnnnnnnnnnnnnnnnnnnnnnnnnnnnnnnnnnnnnnnnnnnnnnnnnnnnnnnnnnnnnnnnnnnnnnnnnnnnnnnnnnnnnnnnnnnnnnnnnnnnnnnnnnnnnnnnnnnnnnnnnnnnnnnnnnnnnnnnnnnnnnnnnnnnnnnnnnnnnnnnnnnnnnnnnnnnnnnnnnnnnnnnnnnnnnnnnnnnnnnnnnnnnnnnnnnnnnnnnnnnnnnnnnnnnnnnnnnnnnnnnnnnnnnnataacttggtcctatccaggactcgctatacatcacagtctgtgtaggatttatcagatttaaactaatctgatcttctcagggcctttactctgtggcacacaaccacatcataccaactggaatacctgggaactacctcttccctgatcgaagcccatcctacacctgtgactgaaatagcttcagacacatcggattaccttcgtccactgaccaggttctgtgtctggaccaaaatcctatccactgactctgagcctttctctaccacacttgatccccttcggatctgctcacgagtccatcgaaccattttaggttcgcgaagctgtttctaacactttcttctgccaaaacactggagtcctgcaccattggcttccacagagcctctacaggcgctatattcctcgatcatgcaaaatatcgccaccaaggacctccatcaaggcagacatctaaccccgcgtgtaccctactctaaggtacgttcacatatctaagttcctcaggatctagatgcctcactgcatctgatcatctatctgaggataataggctaaccgaagcctctgcggggttcccaattctctgaagtacgcctcacctctcaaggtcacttcagatccttgtcactaactaagtgacctgttagacactagccatatacatagctatgtctcctctcatccttgaccacctgaaatcctctcaggatataacatatcacagtggccctcggatgactatcgaccagtcctcataaaccacataaggacggcatccaccagctagctaaaggcaccataactaggtttagcttatcataagccaggtgcttccccaaacacgcctagctggttaacaactctcgcagctcaatccggggatcgattccacagatcttccgctgcgcactctgatcctcatcaccactgatcactcccactggagatcagaggatcctctgtcctagacagatgcacatctctgacctgttcatactacccaccgtcagagattatcatcaggcatggaacatctccatgctatcatgcttgaggtatcaacacctgtcccagcctctgctagacatctcaagcatactggccacttggcctggacctcccggtcccatcacatgatgagcagtcttcttgctcccaacaacggcgtatccacatcacgccatggcgtatcatcattaacgcccagatgcatcatcatcagcatctaacatcagtgtgagactggcgactcacacctgtgccatcccaccggacgctacccttaacggggatgcacatatatggtacctccgagaatagcaggaaaccatctggactattcccttggcctaggggagcatcatcacctcgggatcatcatcacccatgagccagccatactaggaggaaaccatctcctagggaggtccatatctcataaccatcgcttcctcgaagcgtaaactctccattcacagatggagatcacacacacaagcagataaacataaaacaggtatataaccataccttaacactggtcagcaacctctgaccgctcatctggtacctctggagactctctctnnnnnnnnnnctcactgctcttatcatctgggtcagaacctctgggtctatccacttgctgacccgtcaggaaaataggctgcttgcctcgacatctgctgagtacagcctcaacttggcgacactgtctcaccaagctgtccatgtctcgagatccactgccggccactagcatctcaatatcacctctaagtcccctcaggaacttagcagctaggacctcatcatctggcatggatctcctgaaatgagcatatttggccagctcattaaacctagccaaatactcatccacagtcatgtctccctggactagactgtcgaactctgcctgcttctgctccctagcatccctgggaaaatacttatccaggaaacaggcttcaaacatctgccaggaaagaacctctccccggcctctcagcaacgctgctgtggtcctccaccactcatgtgcgtcgccctacaacatgtaggctgcatacagcaacctctggtgatcggaacactccatcacctcaaagatcttctccatagcctgcagccaccttgctgcggcaattggatcatatccaccatagaaggctggagggtcatgcttacgaaacatgataagcattttccctcgggctgcagcatccatctccgtctccatagggaacatccggtcccctctcaggtgactcgcaccagactgatgacgacttccctcgccctcatacacaggaggtgtaggggatactctgtcacccctctttaggactctgacctcctctatcaggtcctgatgagccttcatcaaggcctcatatctctcaacatcagcagctctctgccgctgtatctcctcctgtgcctgtctagctgcagctacctcttgctgcatcatctcctgagtctgcctatttgcagctatctcttgctgcaaggctgccatcgcagcagctactggatcagtttgacctggggttgccccactgctgcctctggatctcggcatgacactgcacatgtacacaaaacagtgagttgatcaggcccacatatagtgtacccatatgcaatgctcatgtcagatcaaaccacagcatcaagcaaccaacaatttcatacataatgtcttaatcaagaaaccgctctgataccattaaatgtaacaccccggacgtgctaacattaatgataccaaaccacgctaaaagcgttatgcatgcggtgtgcggaagcgacaagatcgtttttcttgattacattatgtatgaaatataaaacacaactaaagcataaaacagacagaactgatccagataaaacatacacaacataggcagatacatactatacaaatatactcaggagggaacataacatacacaatctcacaactgtacatatacatgctcaaaaacatgaccacaggcggtcatttataaaatatgtacagactcgggtgtacacacaccctgctnnnnnnnnnnnnnnnnnnnnnnnnnnnnnnnnnnnnnnnnnnnnnnnnnnnnnnnnnnnnnnnnnnnnnnnnnnnnnnnnnnnnnnnnnnnnnnnnnnnnnnnnnnnnnnnnnnnnnnnnnnnnnnnnnnnnnnnnnnnnnnnnnnnnnnnnnnnnnnnnnnnnnnnnnnnnnnnnnnnnnnnnnnnnnnnnnnnnnnnnnnnnnnnnnnnnnnnnnnnnnnnnnnnnnnnnnnnnnnnnnnnnnnnnnnnnnnnnnnnnnnnnnnnnnnnnnnnnnnnnnnnnnnnnnnnnnnnnnnnnnnnnnnnnnnnnnnnnnnnnnnnnnnnnnnnnnnnnnnnnnnnnnnnnnnnnnnnnnnnnnnnnnnnnnnnnnnnnnnnnnnnnnnnnnnnnnnnnnnnnnnnnnnnnnnnnnnnnnnnnnnnnnnnnnnnnnnnnnnnnnnnnnnnnnnnnnnnnnnnnnnnnnnnnnnnnnnnnnnnnnnnnnnnnnnnnnnnnnnnnnnnnnnnnnnnnnnnnnnnnnnnnnnnnnnnnnnnnnnnnnnnnnnnnnnnnnnnnnnnnnnnnnnnnnnnnnnnnnnnnnnnnnnnnnnnnnnnnnnnnnnnnnnnnnnnnnnnnnnnnnnnnnnnnnnnnnnnnnnnnnnnnnnnnnnnnnnnnnnnnnnnnnnnnnnnnnnnnnnnnnnnnnnnnnnnnnnnnnnnnnnnnnnnnnnnnnnnnnnnnnnnnnnnnnnnnnnnnncctctctgaaggtttctcagaacttggggttttagggaatagggaggaaggattctcgctctcaagggtttctctcaagatcaaaggccataggaaggtgtttaggccgtgatatagggtcctagaaagcttggggaggcctctaatggcagctggggtcgtggggaaggaggaagaggttttctcctctgcaaaacgcgtttcccgttcttataaaagctccaccgaccttcccacgcgactcgcgcccgaaaccacgcacgtcgcgccataacaaaccacgcgactcgcaccgtttaccacgcgactcgcgccatacctacggcccttccacgcgatgtacgtggacatccacgcgactcgcgtgacctctcagagactccgcgcgactcgcgccatatccccacgcgacccacgtgggataccagagaagaatctggttttctaagcctcatcctacgcgatccacgtcgcctgtggcgcgacccgcgccacaccctctgcagggttttccaacgaaggtccccgcgctacccgcgcgggacctggcgccaccagcgccacagagagggtccttacaccacgcgagtaacgtgggaacggcgcgagtcgcgtgggctggccgagagtatggcacgagtaacgtgaagatccacgcgtgtaacgtgggaagtgtcctagaaaatcaagttttcctctggagctccacgcgagtgatgtgaatgttcacgcgagtcgcgtggattggcagtgatgtggcgcgacatgcgtggtaactggcgcgagccgcgcgggatcgacggatttgcttttatatgaaaccttttgggctgagagagagagagagaaagaaaaaggagaggagagaatagagagaaacctccattgatgagcgtttgagctttgtatcttcttcatcgttcatctaaacacctccgacccaactgagaaaatgatcagcacctcgagataagtgagataccccgattgatttctgagattagctgagagaatgtgagattggatttccctgagagaacccttgagagctcggagtttgaaggcgaaagaggccgtgattgagcgagctaccttagggaaagttattccctggtgcttctgagcatcacagaggtaagaaactcgagctctaaccgttggttctgtggattggattttgtgtttttggggttatcttaaggggtgttttttgaggtgttagagccgttattaggctcggactctgtagagtcttatgctcagaggactgttctgaggaagtcagagccttgaatcatcattactgatgaagtttgattttggctctgagtcagtctgaacagagataaaaggttgactagttcactagtctggaccctagagcagttgacaaagttgctcatgagactatataggtgagtttgatcggttgaaactgaccattatgagaggttggatttaggccattgtaagcagagatatgcttggccatagttgatcagagcttgtgttgagactctgtagccttgtgtaggctgagatggatcctgttgagggtctgaggatcacttgtacagtgacttagtttatgtttatagaaaggatgagagtttcctttcgtttgatcggtctagaaccatatctgatactatatatgcttgttcttgtgtaggacgtgagcgtgagagctctggtggtattgaccacgagaccgggagagccagtgatctgtctagagcaggtaagctcttggttcttggttgtgaatcctctgctgtgttccaccatatatccactgggattatggttaggatatgtgtatatgctagtagaggaacatgtaatatgctatgaataactgatagatgtggtctgaaccctatgaaagagtaattgatgtttgacatttgatctgaacccagagatgggtaattatcatataggaccatgagttattgattaatgattgttgtgtttgatccctgaggaagggaattgaagtgcttgattcctgataagggaaactgatgtgtacttgaccctgagaaaagggaaaccaatgaacatagttatgattcattgatagcatgccttattgttatgagacttgaatatgtctgtatgtagatgcggtgtgctgatgttctgatccctatgagagggaaattgacatgtattgatatgctatgcttgaaatgtgaattgaaccctgtgataggggattgatatgcatggctatgatgtgattgaattgtgacatgtctggttgaatgtgaaacctgcctatgcatgctgtacttgaatagtatcctattgtagtaggatagatgacttnnnnnnnnnnnnnnnnnnnnnnnnnnnnnnnnnnnnnnnnnnnnnnnnnnnnnnnnnnnnnnnnnnnnnnnnnnnnnnnnnnnnnnnnnnnnnnnnnnnnnnnnnnnnnnnnnnnnnnnnnnnnnnnnnnnnnnnnnnnnnnnnnnnnnnnnnnnnnnnnnnnnnnnnnnnnnnnnnnnnnnnnnnnnnnnnnnnnnnnnnnnnnnnnnnnnnnnnnnnnnnnnnnnnnnnnnnnnnnnnnnnnnnnnnnnnnnnnnnnngcctatgtacacagaggtagcctcaccaaaaggagatgtaccagatatatagttgatgcctcgggatcagagatgtacctatatatctagaggaagcctccgctagggattcatgcaagagatgtgccgagtatatagatgcagcctccctgtgaggagatgatcctatatacttagatgtagcctctgcatgatggttattgatgtgataaatgactttatgtcatgattatgccttggttttggctgatgacgtgtataacctgattgtggtcaggtgtattgtgcattgacgtgcttgatgattgatttaatgtttcactgatgatgaatgtgtattagctgagtccttaatatgggacgatgctttgagatgatagtacattgattgcatgtacattgattgagtgattcgttgatatggatactcatgctatgattgtgtggtgatgtattatgagtgtgtagtgcatgaatacaagccatgagcttgttctggttttcattgatagatgtatatatatatatatatatattgattgcataggtattgattatttgtgactgatattaatgatgtgaataattatgtaatatgtacgtgttgtcagtgaaccaggggaaggaaatacctttaggggccttgagtttactgagattttatatctcaccccttgtgtggggctatgttgcaggtgaatcttccagagtagcagagaaatcccaaggcaagaggcctatgcaggattagatgctgcgggacaccttaggatagaggatatgagcatgtggctcagatgttttgtattttgctttgttttgttttgatgtaccttgaggggatattcgtacagttttgtattgtacagaggaaccttatatgtatattcaccatattatagtgtacagtgttatacagatgacatttgatgatgtcactattagtagttgcttccaaactgcttaaactctgattgattatctgtttgattgtggtgtatgtttggtaatgaccctgattaaaaaattggggcgttacaataaattatgtcttttaattgttattaaagttaacaaattttttatattagataatttataattagataataggatataattctttattttcggtgcatatttttttatattaatatatatcctattttcttatttaatatacctttattgtagtcatgacttcattgatgatttagacttggtaccatttatcatagcagtctctttaaataaccccacagggttagctcaactgttatagcaagacgatgcatcaagaccatgggatttgcataaaaatttaaaggaagatattatgacatgttcttaaaatatttataaaactataaaattaaaatatagtggttactgagacatggttttaccatccagtattcttttcctatcatttcttttcaacgattatgtaaactatttattatattacttttcaaattatatataagtcaatattttttattaaagatattcatttaatatatatatttattaattcaagttatattattatattttaattattcaaaatatataatgtgtttatttatataaatctataattttatctaacttaatttcttatataatatcattaatttaactataattgaaacagtaaacgaatttatatgttcgttaatctaatgatcgatttgattttaaaaataacattgaattttagatatggaaaaatcaacaatatttccgaacacggaagaaaactcgtttcaacaagttttttcctctagcaaattatctaaaccagaccgtgttaagaaaaagagcaacttcaattccaaatatgaaatagagtgaggagctggattagtaccaatggacatttacattaacaaatgcatgttaccgaatttgatgtggttgagaaaagagaattctattaaaaatattaaaggtggtcaactaaattttttcattataaattagttataaacaaaagttggtgaatatttggtaccaatatcatacgaataagatggtatcaaaaattcaattcaattgcctctagatgtgttctaaatcgtaacctcaccaacatgcatgtatcattaattaaagtggcaaacacaaaaaagtctcataattatctcagaagtcatatttgtgtttgcaagctgcaatatctcagaagccagaagttaagtaaagtgaaaaatatatgtgatgggttctctggctcgaccaagctgactctttttccgagccagaggacccggacctacccaaaaagtagccagtgacgttttggcttttgaacgttccacttcgaatggttcatttccctcagtgcagcttaaacttgaagcaagcgagaagaacatggaagcacctgttgttgtagtcactggagcctccagaggcattggccgtgcaattgcactttccttaggtaaagcctcatgcaaggtcagttctgctccttactacgtccatgcatgcatcatgctcacatggtcatgtaatgtaataatattactctcatagtcatactctcatgccatcatgtcattctattacaggtcttggtcaactatgccaggtcatccaggcaagctgaggaggtttccaacttggtacctagctacaatctctaaactaacttcttctctctctttatgtttgtggttctttttattctcatgcttaatttgcgaccaagtgtggccacacacaaaattgcaagatatatacaaaatgattgtggacgagaagatattattgtaacatcaaggaaaatatgatagaaaattgattaaaggtgaaccttaacataacgaggatacatacaacctctttgcatatgcaaagtaaggatacatacaatatctttctcccatagaccaagtgtggccacacacaaaattgcaagatatatacaaaatgattgtggacgagaagatattattgtaacatcaaggaaaatatgatagaaaattgattaaaggtgaaccttaacataacgaggatacatacaacctctttgcatatgcaaagtaaggatacatacaatatctttctcccatatattcacataaagaggagcctccggacaatgaggtatgctagttttttatgttaaaaaatctgttaagataatttagacaggtgtagagaagactactgaaaacacggtggtgtgtgcaattccaatggtgaaagagagtagattgcatgaatttagtctttaaccgagttttagtggtgtgtgttccatataactgaccttgtctagagaggtcattgttatacttttgtgtcatattgatagatccacgtgcttgatcggatttgtagattattatatacttattgatcatatgagctctcaatatttttctggtgttattaggagcaagagttcaagctagctcagttatgctcattgactaaactgcaattatttatttgattattactttcagattgaggcgtttggtggacaagctcttaccttcgcgagagatgtttcaaatgaggctgatgtggagtctatgattaaaactctgagcaaatatttttgatttattaagtggataaaattattttaccttggtcttagatttattcgtacgtgcaactctacatgtgcaggcagttgatgcttggtattggtaaacaatgcaggtagcttggataaattaagaaattaagcacttgtgcaattacttatttatttattttaattttagatttcatactcaaaaaaaaaaaaatatcatgagttcaggaattattcgagatggtttgttaatgagaatgaagaaatcacagtggcaggacgttattgatctgaatctcactggtgtttttctttgcatgcaggtgaatgtgttcagaattttgagttcataatgttaaattaagtatagatgtttttttttttctttcaaatttaagatataggagctgatggtttgcttttcacaggcagcagcaaagattatgacgatgaaaaagaaggtgacacaccacactttaaataaaacctcatggaactctttggccattaattggacttctttctgtcatttcatcattttgtcttctttttttcttatgctaacaacaatgtctatgtaatttactagatgttagtatgtcactgacttactgatattttttattgattagctactgagttatatttctgaaaaagttttgcattcagctagcccattatggatttgcaaaatgacatccagttgttgctgaattaagctctttaatttcgtatcagagtttacttggtacttttgcagggaaggataatcaatattacatcagttattggtcaggatggcaatgttggataatcaaaattatccaacacattccacctgcaaggttacatccttgattccagcattatgtaacagatgcaaaacctgagacttggcggatgtcttgtctgtatctgttgacacgtgaagatgcattgtacctactacatctgtgtttgtgaagttccaggaatgaaacttttgaatgccataaacaccccttatcttcgaaacattagttaaggcatccttcagctcatgctcatgcacccttggcactctttggagcaaaacttctgctgaattttttagtaaaggtatcacggaagatacaattaaaatagaaataaaaattgagcaggcaggatcagcaataagccatcccttgtacttgatcaacagggtagatataacaacaccgacactccccatggtgtcagcaagaacatgcaaaaatatcccttccatattgtgatcgatatggcgatggacgtgctctttatgaacaagtggagcatcttcatgacaagagtgttcagtttgatcatgatgttcccatggtcatggcagtgggcggcagcgtcatgatgcttaaagctctgaatgcagtgtttgtcttcatgatcatgacactcaccatgatgcttcctctcatgactacagtggttatgattatgatgatggccatgatcaccagagcatgaatctacttggcaatcacttgaaactgaaatatattcttgattgcttccatgttttgttgtttcgtgaccatggcaatgcagatgatcatgatcatgatcatgatggtggtgggcgtggtgactaagcgactccgagtgtgagcacgaatgggagcatgatgatccagacaatccatggccatgggcatgatgatgctcctcgtgaaagaatatcaagccaatgacattcaccacaagaactcctatggagacaaccaacaagctattacttgatatctattgaggatccaatatcctctcaaaggactccaccactatgagtgctccaacaagaaccagaaacacagcattagcataccctgataaaaccttaaaccttcctctcccatagttatagtgattattagccggcaaacgagatatatacagcgcatacaacccaatggccaacgcagcacaatcaaagtcaccgtacgcctacgatcctatctgactattgaggactttgatcttcttttgttcaattgtgcgtgctttgcttaacacatgcaattccattaagctcgcaccatagtactcaacagttacacctacttgttcgacactatatttcgattctgcccttttaacaacatgtgacaagcatccgatatcaggccaagactattgctcataaacccagcagcaaactccacaaccatatacccagcattgatgagaagaaaaagcacgatcttccgcgacttcctctcactcaaaacatgtctgataggcttcataatcatgtcactagagaactcctcttgattggaagagtgaaaaggatccaaatctctaacaccaacatatagcaacaaaccacaaagcaacaaaccccagagggaaagctgagggaaataaaaaagctccaacaccagagtgcaaacaaaagtaaccaaaaactccctctgagagtccctcgaactcgccaaactatcaacgtcatcattatcatcaccactataactctcacacaaaaacacaccgaaaacaacagcgttcgccagcggccacgccaaattcccaaaggcgacaccatcctcttcggtctcaaacaaggagaaactaacaacagcgggaacaaacagaaaaacagtggtgaaaaagagagtaattaaccgaacccgtttgcgaccgagctgtttgagagtagtcccggagtccacgagccggtagcgggcgagaaagccggaggcaaagggaaggaccaagggccaaatccggccggtaacgcaggcgggggagaacgggaagcattcgattcggtcccaaccgaaggagagcaggaggaggcagagggagagggagaggaagccgcggaggttgggccggagggggcttctgggccgggccgagatggaatccataaattcggcgaggctcatggaggcggtgccgcagtagcggagggcctggaagcggaggaggattgatttggtgactaagattctctgctgggagggtgtgagtgatgatgagagaagagggtgtttgggtttgtggtggaggaagggatctttggaagaggaggaagagggtgagaagagggagaagaagagggtgagggagaaggagaggagggagacgaggaaggagaaggggaagagggagaaggaaggggaggagggagtaaagggagcggagggagaagaggaggaggaggaggaggaagagggacgatccagattgcgatttcgattacgggagcgagaatgagcgccggcttttggagggggttgggcttggggttgaggatgaggagtatcggaaggcgggcagagctcccggagtgccaccgaatgcggtggtgcgtggcggcaccgagaggcggtgaggacggtgctggtggtggtgagggtgggacttatcgtgatcggccatgctagggtggaccgtgggtctacggttcccgagtcatggaacttctttagtgatgttcctcctgtgaccatatatatacacaatgcacgtgccaacctgaacaagtagctgttgaggaaccacaatgtagagacagagtctactcaaccaaaacatgttcatgttgcctatcatgcgtgagtaatttgagtagttggatagtttgttttttttttttttaattttattttacttttttttctctttcttttttttgctgccatttacaaaaaagtcttcatctttctcagcacctcaaatgttgtgtcgtcgccgcacagcaccgcccactccaccgtcgcaccgcacctcccaccccaccgttgaaggagataaccattgggttggagaagagtgagcaaaggttcttgtgggtggtgaggtccgagttggatgatgctgactcgatggaggaactgagtctggacgagttgctgccacaagcttttcaacagaggaccaaagagaaggggctggtaatgagggagtgggtgccacaggttcagatactgagtcatgactcggtgggtgggttcgtgactcactgcgggtggaactcggtgttggaagcggtgtgtgaaggggtgccgatggtggcgtggcccctctacacgtggcagaagatgaataggatgattatggtgaaggaaatgaaggtggctttgacggtgaacgagaacaaaaatgggttcgtgagttgggaaagagaaggaatgacagagagaatggactaatggagaaagagaaaaaaaaaaagaagaaacaaattggaatcatagatttaaaattaaaaaaatctaacgagtcaaaattactcacgtatgaaacgcaacatgttttggtgttgcgtatgctagactcctcggtcatgtagagacccaacttctcaccaaaggcatgctgccccaactcatgatacctatcgaatctcacacctgacacaccaagtatcatttcgtgcatctcaaccatttgtcatagggtaaacaacctgatcacccatgataacagtggtataactgtccccgaataataggcaatttaataagtttggattattattattatatatatatatatccaacttctctttcatcttgtccccatctcaattttttaacctcattattttttactcttttattgttatattatttagtatatcgatcaatgtctcttttttcttgtgtttattttcttttaaaacctggagatggatcttctccaaataaatgttactagatgagatcttagtgaaatcttaacatttcaaaatctcaatttttcttccatgtgagaaaatcttttcccctttctctttactccactcctgcatccaaaacataagatttgtgttgagcttctttttttcccatttcttctctccttccattcctctctcttgctagccagagcttgcggtgccttttaccaattctggtctactaccttgctttgtgctattngttgcgtatgctagactcctcggtcatgtagagacccaacttctcaccaaaggcatgctgccccaactcaagatacctatcgaatctcacaccaggtatcatttcgtgcatctcaaccatttgtcatagggtaaacaacgtgatcacccatgatcacagtagtataactgtccccgaataataggcaatttaataagtctggattattattattgttatatatatatatatatatatatatggtttgttattttgattagtttatgatttttttaattaatttataagattatttttaagttttaacatacacacacttcataatttgttgttttgtctttaatatttaataattttttattttcttaatataaatattgctagtattattatttgaattgaaacattatttatactatttattttaatgttcaataaatttttaatatttaaagtaaaagggtataaatttaaaattgatttagaagttcaaactatacttatcaaaatatattttatctataaaacaaaattaaaacttatataaaaatcttataatatatttttgactaaaatatgttttaggttcctaataaataatcaatttttattttaggttcttgataaatgatcaatttttatttttggttaaaagttttgataaatcatggatcctttgcattgaaatttttttattagactcaacaaaactaatcatctactagggacctaaaatatatttaagcttagatattttaagtttaattataattattaattaaattaacaattataattttattacacacttctaatttgataaaaaaaattgctaaggaaatgggccaaatgcacaaaatcacaagcactatcctatagtcttagataaccagtagctgccatgtcagtttgaagatacacagtaagtaacgctatggagaactcaaaagattctcatatccaccccatgtcaagattgatgctattttacactaaagcatgtcagcagctgagttgcattctctcaaaacatgataagttagtgctataaggatgagagattaagaatgaccgaaatttgccacatccttgctcacacaattatactcaataaattgtcaaaactaaaaattggaggaaagaaaaatctaaaacacaacttaaacattctcaatctagtatacaatggaatttcagtttgtgtgtgggacatctcaatgatcaagatgttgtatgatcaatggttatcattatatgcttaaagtgcatttcctcattataagtcgaacaactgaacttttgatttaaatggagtatcatatccaattcttccaagtctattgattctatataacgaatactatattttcaagaagaaacaacagtgaaaattctgccttaaaagaggtttacgtttgaatcacctcagcagttaaaacacgttacaactatgtcgctgttgacaatagacagcttattttggtagtaattttgtgcagatactcacattattgggcgatcacttttgctgttgctctcatgttgctatggagcaatgataggctcttttctcaaaagatttcatctgctacggatattgcagcaagcatttttaatatggcttacggagtggtccaaagtctcaaccatgattttatgacgagagagagaggagtatgtataatttgaaactatgcttgaaaataacaggtggtagggtagacacatataagttagttgagtttattttaaagcaataattttttttattttttacaactttttgatagaaatcaggttattagaaaaaagcacttgccaactacatgctaagtggtaaattctgacaagaaaagcttaagaagcattggcaaacattgctagtcgaatttggtcttggcggttgactttcaaagtatagttgaacacagaacatatattatcagtattattaatattaattattattgttgcatattccacatgaacttttcaaacgtgatcagcacaaactttttcaaagctcctatttaacatttatgcaactaaagaactaaaatgcttggaactgccatttgacatcgtgcagctatttgcatcttccaaagcctggccatgtgctccaaaagaaaaatatcggttcatcaatttcttattgaaagagcccagcttatagctcaattgtagggagccatcaccatccattggtcgattggagcaagagggtcccattatatcaacacgttcttgcttattattcgaagaacgagaagagatagatagttcttgaaaaagattagatgttaaatgaacaggtagaggcacttgtggctttaccttaatcacaccttgcactagacctgcatgaaaatgttttttggctgaaggacttggaagataagtccttatagatagtgttcttttgttgtttggaagagaacacatttttgagtatctttgcctcaatgggattggaaagtcttccaagttgttccttgaactgaaagaattcatagaaacatcatcttctaaatctgaggcagcttcttttgtgtctcttcttctagaactttggagcagaaactttaagtgccttgcaccataattgacagaactagacttgctgttacatggggaattggctgagtcatagttgtttatttcacttgaccatgaatttgattctacacttgcctgatcataattggaatcacatgaattctcaatgcctgtgtataacaatatctcagaatctggtattctaaatgatgttccaggactgcctcctataccatgagtcctaagatgcttcacaagggcatttcttgtcacatagtcctgataattagagatccctccagctgaaattaactgcttgattaagatttcagaagatgctgatcgtgatttttgtctaagatgatccaagggggtcatcccatcagcatcacgaatattcaaatcaattgatggaaaagacatcagtaattccactacatcacattggatattatgaatcacagcaacatgaagagctgttcttccatcattgttcctgacattgatgatgtccttcatgttcacaatcttttcacttgtcagttgcttcatgagctcagtgtgcttgtccagtctacagaaaccagggcttctgaaaccagccactaccatgtgaagaaaagtatctccatagtgattggttaacgttgctaacaagggagatgctccaaccagaatctctaccacgggtaagtaacctctgtaagaggccacatgtaatgctgtattgccttgagcattagttgagttgatgatatcataggattcaattagatttctcaccacctacatcatcattaaaataatgaaaataagtaacaataatttattaaccacgaagaagatgcaaaaaaaaatggacatacaaaacttttgtagcatcaactgcccccagaaatatttaacatttaacgctaattttagtctattatacaagactcgacggtttgcaccccgagtcaggtgccaaaaggagccaattggaataaagcattgagaatcactgaaagaggaattcacacaattgtgtgtagtactatctgagcagttcactaaatattttatatttcacattcatctttgaggagcctgatctattgtgaagctagataactcaacgaactagatgttctgtagtatctataaacattttgtatactccacttacgtagttattaagcctccctggccaattgaagaaaaaagggcatttcagtgatccataaaataaaccaggcttttccataatttattaaggatctaatatctatgtccttaggacttctaagtataacaataccattaaacaagtagggcttctgaattttctacagcacattcaaagtgtgtttggttttcctttgagaatctccaaaccatgatttaggcaaaagttactttcacccaaaccataaatgtgggactttttcaccaaaaccaaaacatgcaccaactactaaggctgtgtttgaacttccatttactcatgttgaacaccaatgatccatgagagtggaattggcgttcaaacgtgccttggaaagtggaattgagataaaacaaacacactctactctgaagtaatgtgcctcacctcaacctggcctcttgcagctgctgcatgcaagacagtacatcccagggcatctctataagacaaaacctgagaaacagaaatacttcctagaatctgcttcagtatttcccaattccctcctctggcagcagcatgaatggccctattcatcacatccctcttgaaaaccttagaaccttcatccaacttctcttccaattctgcttcactgccaccaaggcactcctttcttgaaagagcagaatgaagaaggagcttaaagacctcacagttcttgcccctggctgccgcataaaacatgtcagtgacaccatactctccctcaccaaacaccaaaagagggtctctccccaacaactcaagaacaaagtccacattcccggctgaagcagcaatgtagagaagccatccaccatagcctgcaaggataagagagttgtgccctcttcctgtctcacactcaatcataagattccttgcaaccttggaccggcacttggcaacatcctcaaacttggactcatcgtcccacacggcttcaaggcggcgaattcggcgaagggaagtgagcttaataaggaggttggtgtcaaggtggagaagctcagtgaccagatcatagaggccatttgcagcagcataatcaattggagatgcataccaccatcggtctcctgtgctctcccaacgaagagggaagtttgaaggaggcatagtagtagtccaaattagagatgacccttttacaacaaaggacactcactaccactttcttcaattctagtagttgcaagcagcagtgtaaagatgcctttaagacccctcattaaagcaaaaagtgaaagcacacaccactaacagaatatacgcttattctcttggactagaagttgttgaaaaatgaaaatgaaaatgagaaattctaggaagtgagattaattaaccttgtaaacagtgaagtacaaggaaacaaaagttggaatccgtagttggccaccatggcatgaatttaaacagtgttctggctgaagttgaagttggtggcaaaagcaaaacgctcaagggaagaaaaaagggatagcaccaactataaactgttgtggcaatgtgttagtgacaagaggaaaattgccactagataggatttgtgagggaggccacgcacttaggaaaagttaaaaagaaggcttagaaagattgagattctctggtccgtgagttcacagccaaagatgatatttttattaaaattattgaaattccgtagaccccaccttgttggaggttgttttcattcacttaggaaatttcaaggatcgtgtcatcatttgtagtgggacatggagcacacatttagctgggcacattaaaatgagagatttagaagggacacatttttttttgttcttttaatttaaggagcaactttgccttccataattgattttcaagactgggacatcgaaacttatcggcatgatctgaaatttggtagccataaagttttgtggtgttagcaatttggagcgtgagttttgcacaccagaaatagagatgccgctagggacaacaacgtgagttttacgccttttggcttatttggaaaagaggggagggaacaaagaaaggcactttaaccattttgtctgtgtatatgctaaatggaatgcatgcatgtcgtattaaaaagataataataatgtttaataattatgcacatcttacagtttctttaatgaatatggttgtcctttcttggtacccatcttagactcaaatggcatgacctatacatgccaaagagatagcacttattgcctcctgtaaaatatacttacctttttaaatgaaaaaattgactatacgtccaatacacttgcaggttagaaaaatgtataaatattagagaagtaaatcaaatttgattagctaaagttgttaaattacatatgaatttaacggaagaaattaaatctttatgcaatcttgtggagtacaaaataaaagagaaaatctttatgcgatcttgtacaaattaaaagaaatttattacaaaagtgataaagttctttcgtctctgtatatatctctttttttttttgttctcttcacataattcgtatcctgaaccttacttgaagacttcttatgatggtgaatttttaaatacgattacttttttttgtcaaaactattgatataatttaaagagataaagttctctgtatcttagtaaattactcttttggtttgttctttagtgcgtctaaacaaattactgtagtgtggcctgcattatcccttgggattgaatgacacaaaacaacctactctttgtactgtagaggaaaggataaagaagacggtcattctgattctctcaaactcgatgaaaacggaaacgcacgagacccgtagaatgtcgcttgccactactaaaggtttttttactactattcatgttaagactaaggactggtttacactttttcattgttctaactaatgagtaattttaaatttttctaaaatattttcttactaacctttttacttcttttataagtattaactattaactatattttatattttcaagacattaaatacaatattttttttgttagatagcaagagaatttgtgagaagatataacacctcattactaataatccaattagccctaaaatgtattttagggtatgttagatgatttttttttcgtaatcacttatagaaaaaaaataggaagaaaaaatgaaagaaattttttcaaaagataaattattaaattacatataaattgatgcataaaagctctttcatattaatatctcttaaaatttatttttagtttatgcgtaaattaattttaatttatgtacgtacttattttattttattttctattttcttctcttataaatgtttatagaatattttatccaaccatatccctagtcctcttaaacattagtttggcctcaaaacaacatatcccatttttatttctctcttttgaagaactttttaaaaaaattattcacgttatcattttaaaatagcattgattattatatttttaagacttaaatatattttttgtttttccaagtattgtagttgtacaattttgatcacacaaattttaatcgagtaaattgaatcctctcaactattgcaattaatttggtttgggatttttaacctaattgagttcaacttgaaccaaattaattaaatctaatagtgattggtttggtatcgaatttgtgagttcacaagatgatgaacccaaaccaaactaacctgttttttatttttcgggttcggtttgccttgaagagcttgctcttcactggtcaccattgataataatgtacagtataagatatttaggtactgggcattggttgaagtagtgtactaaaaaggttgaattgaagtacgggttgtcacttgtaagtaagatcatgcaccaaattttttacataaaaataaaaaattatttacttcaaagatgtagtatgaaaattattgatgggacacaaatgattttatttttttatattggttatatctttaaatgtaaaaagtaacattttacattagttataattaagacggatgtatatatgttaagtaagcaattttcaaactatactttttatgtaaataaatttttatttttacctattttgatgatcagaaagtctcatacaccactcaatgcgcagtaatatgttggagcccatatgttttagcggttgaattggaatctttatcaaacaaaggataagactaacatgttctgattcaattaaaagatgtttaagttaattcattaaccatatacttatacgcgcagttttaaaactagttcattaaaaaataacgttataaaaacattctgcctagaatattcttagaaaattattttgaaaaaccattcctcccttacctagctatgacctaatgccatattaaaattagcggcaaaacaactaaaagaaaaaggaaacatgtggaagagagagcaagttagagcaataaacagatgaatatggataagaaaaataatttggaaggctagcacgcatgacattgtaactcgatgatttcaatgcaaacaacgagatacactaatagtaagcgataatggggaaaaatgaaaagtataaaatctgctattacattatacaaaaatatttttcattataggtnnnnnnnnnnnnnnnnnnnnnnnnnnnnnnnnnnnnnnnnnnnnnnnnnnnnnnnnnnnnnnnnnnnnnnnnnnnnnnnnnnnnnnnnnnnnnnnnnnnnnnnnnnnnnnnaatatatatatatatatatatatatatatatatatatatatataacacaatataacagttatataagtgatttattgacatatacaaggactaccatgcattgtataccattctagtgtatataatatggttgtatacagaactgtacctacaccattctagtgcaaacaatgaaaagttgtaactcaatgatttcaataatgagatacactatgaggaaaatgaaaagttggctacattatacgaagaattaacccttcaaaaataaaaggtggccaaagttagaggagttaattaataacgagacagtattaaaatatgctgatatattatacagaaatattttcatagaaaacagtccattaaaatctgctgatatattacaaaaatatttttaagaaatgttacatgtacaacaatttgtataataacaatttttgtctatctctcacataatttattacatgtacaactatgtcacatttcaatagtttttcattataagacaaagcaagtgtggcaatgtagcattcttgatatgagtttggactctgtgtccgtggctctaacactgtgcctgtgacttttttatattcaaagaggaccagagtgaggaaaagcaaaagatttccgcttgttctggttttatggtaggtatttgcttgtgtcataggtgcacgaatcttactgtctttataactgctaaaaaatctaatcaatgaacttgtgtttttctcttatcagagtataacatagttgattatggaaatttgaattattatttgttaaaatatttggttgatatatattggtaggagagaaaaatgatatgttactccagttcagaaagaggtgtaatcttacatggaaggagaagatgaagaggccttcataacacatgtacacaacaatgtggagaaaacagaaacagaaggggatttccttgaccaaagccattgcctattctatatggaaatgcttggccttccacgctcttttagctggtatcttttatatttttttaagtatcacatcactgctgcactgctacacttccttgagcataaattttgtgaatttttttttttgggcaataatggtgattcaagcatcaaatagaaagaccaaattgaagaggaaattgatttggacagacaaccattccatggtgccaaaattgtgaaaggctacccgagcaattgattctgagaagtgatgggagattggtgtctttcgaatcccaaccatcgtggccaattcccttgctgttgtgatgaagcctacaaaaagtaaataacttcatcactagaatcctagattgagtcatacaagagttagcacatgtaaagatttatgaccaaaaattgtatgattttgtagttgagattttgccttatttgaaatttgatttttgaaaaaagtttagatagaagttttgttttgttgcaaattttatcttttatcttttgtttcaattagtaatgtaacttcaaataaatgtgatggcagattatatcttttaggaatttcaaattgaatgtaagcctatacatattaattctcattttatgaatttcaatggtaattattagatttaattttaacatctctatcttctctgagcttacttcttatgggctgaaacaaattttgattgagagctaaacacaatgaggttgagtgcaaacgctgctgagtgatccaatttccaggcagttgtggtgcaaatatgtccacttcagacaattcttcatctgtcattctaataatgtttaattgggaaaactatcacatatgagtagtgcaggtaactaaagttttttttcccttaagatctcaaagtttatggaacgttgtaatgtctaaagttgatacaccgctattggaagaaaatcctactattgcttgtatgaaagcttatgacaaagagaaactaaagaaggataaaactatatgaaagctttgactaagagaagctaaagaaggataaaactatcgcttgcattcacgacttgcagatcacattttcaccaaaatcatagacttggaaacacctaaataggtgtggaacaagatccaaaatggacttgacaacaacaataaggttaaatctgttaggcttctcatattaaagagagaatttgaatcaattgaaagatgaaggaacatttcaaggaacaaatcgtaaaaacagattttggaccaagaattaaaacatttaaactcaatattttaatgtaattaaatggataaaattaattcttattcttgttttttcacacttgggatggatgcattaagtgacagacttttttctcccttttttttcaacgagattaagtgaaataaatatgaatcattaactattattaaggttggtaaaatggatccggcctacacttaggatcaagttggacttaaaaaaaaagcctatttgacccagtccatattgcctgtcagaccaaatggacttaggttacgatccgacacaattaataatatataataaatattaaaaatatattaacatattaatataatttatagttttatatcacaatttatatttttttttaaaaagtaaaacatacaatataacaaatacaacaaaaaatgcatgataaataattttttatttttgggatttttttaaaatttgtttgcatataattaatttttaaatttttatttattttaaattattcaaataggcccattgacccaacatagggtttaagaaatttcaggcctgaattgaattatttttattatttgattcgatggactggagcaagaaggcttatccattttgttagccctaaatattacatctaatcttacattaataattaagattaaaatatagtagttacgttattttttatgtaccaacttttaacattttgaggataatggtatctttggagcctgttgaagccttatcataaatcaatatagaacaacaaaagaactgctatgcatcctctagggctcttaaattccaattttagagctcttaaatccaattttagagctctaaaattggaactgatcaaaattccaatatttcaacacttttgcaagtaactgtaaacaataatcaattgcaaaacgtatatattttggaaaaggaaattttggttagagaatcagtcaagttcttgacagtagaagagcaactttttatcagtaaatattagtttgctataatgctaattttgtttggagaggggattgacccgcgacctttcttttcttttcttctttctcaatcatccaacccaccttatatctctcatagaacagcaactaagaatatactattatgatcagaagccccaaatctacgttaaccttaatccttaagttgctaatgtaatcagtcagtgtttcttgagctgcggtccaacgcctaacttttctctatgtacagtatgttggtctgtaactgctatattatcctcctgaaaatatcttatgcctgtcctcgttgtctatcttttttggaagttactttgggatgatctcctaaaaaattctgtgactaactttgagaatgaagaagaattgttcagcagcaattgagccggttcatcatactctacaattgtccctgtacaagtcaaaatagtagtgcttgtcagcaacttacacaaaggggtgcaataatatgctaccataatttgaaatcaagttaaattcaacctaacattacactcattttcagtcccccacctccccattaaattcttttggatgataaccttcactatgagataatgttttcataatcattaatggtatgatcacatacattgaagtacataccttcatcaaggaccaaaacgcgatcattatcaataactgtaggaattctatgtgctactgtaatgactgtacatccacttgtttcttccctaattgtcttctgaattaaattgtcagtggcagtgtcaatggatgcagttgcctcatctaggatcaaaattctccttttcttcagtagtaacctagcaaggcaaacaagctgcctttgtccaacactccaattctctccattctcggccactacatcagtgaaagaatatttcatatcaataacaacattggggtggaaaagcaccggaactgtgaagttggacgtacagttattaaagttatacacctgaatggtggaattttttaacatatttatacctggtgcatcaagaagtctttgatcccgccttactatttcagcaagatggcacttgctgagaacctgaaaatagtagttctttcagtaataagataaacattggcattttcaagaaagtgtgttaactgctaatgctaacctcccaaagttcttgatctgcgtgttgttctagtggatccaagttagtccttacagtgcctagaaacaaggttggatcctgaggaattatgccaagcttagatcttaaatcttgcagaccaatcttggaaatatctacaccatcaataagtatagatccttccaaaggctccaccactcgaaagagggcttgcaccagagtagattttccactcccggtcctgcctactacaccaattttcttttgtgctggaaagacacaagnnnnnnnnnnnnnnnnnnnnnnnnnnnnnnnnnnnnnnnnnnnnnnnnnnnnnnnnnnnnnnnnnnnnnnnnnnnnnnnnnnnnnnnnnnnnnnnnnnnnnnnnnnnnnnnnnnnnnnnnnnnnnnnnnnnnnnnnnnnnnnnnnnnnnnnnnnnnnnnnnnnnnnnnnnnnnnnnnnnnnnnnnnnnnnnnnnnnnnnnnnnnnnnnnnnnnnnnnnnnnnnnnnnnnnnnnnnnnnnnnnnnnnnnnnnnnnnnnnnnnnnnnnnnnnnnnnnnnnnnnnnnnnnnnnnnnnnnnnnnnnnnnnnnnnnnnnnnnnnnnnnnnnnnnnnnnnnnnnnnnnnnnnnnnnnnnnnnnnnnnnnnnnnnnnnnnnnnnnnnnnnnnnnnnnnnnnnnnnnnnnnnnnnnnnnnnnnnnnnnnnnnnnnnnnnnnnnnnnnnnnnnnnnnnnnnnnnnnnnnnnnnnnnnnnnnnnnnnnnnnnnnnnnnnnnnnnnnnnnnnnnnnnnnnnnnnnnnnnnnnnnnnnnnnnnnnnnnnnnnnnnnnnnnnnnnnnnnnnnnnnnnnnnnnnnnnnnnnnnnnnnnnnnnnnnnnnnnnnnnnnnnnnnnnnnnnnnnnnnnnnnnnnnnnnnnnnnnnnnnnnnnnnnnnnnnnnnnnnnnnnnnnnnnnnnnnnnnnnnnnnnnnnnnnnnnnnnnnnnnnnnnnnnnnnnnnnnnnnnnnnnnnnnnnnnnnnnnnnnnnnnnnnnnnnnnnnnnnnnnnnnnnnnnnnnnnnnnnnnnnnnnnnnnnnnnnnnnnnnnnnnnnnnnnnnnnnnnnnnnnnnnnnnnnnnnnnnnnnnnnnnnnnnnnnnnnnnnnnnnnnnnnnnnnnnnnnnnnnnnnnnnnnnnnnnnnnnnnnnnnnnnnnnnnnnnnnnnnnnnnnnnnnnnnnnnnnnnnnnnnnnnnnnnnnnnnnnnnnnnnnnnnnnnnnnnnnnnnnnnnnnnnnnnnnnnnnnnnnnnnnnnnnnnnnnnnnnnnnnnnnnnnnnnnnnnnnnnnnnnnnnnnnnnnnnnnnnnnnnnnnnnnnnnnnnnnnnnnnnnnnnnnnnnnnnnnnnnnnnnnnnnnnnnnnnnnnnnnnnnnnnnnnnnnnnnnnnnnnnnnnnnnnnnnnnnnnnnnnnnnnnnnnnnnnnnnnnnnnnnnnnnnnnnnnnnnnnnnnnnnnnnnnnnnnnnnnnnnnnnnnnnnnnnnnnnnnnnnnnnnnnnnnnnnnnnnnnnnnnnnnnnnnnnnnnnnnnnnnnnnnnnnnnnnnnnnnnnnnnnnnnnnnnnnnnnnnnnnnnnnnnnnnnnnnnnnnnnnnnnnnnnnnnnnnnnnnnnnnnnnnnnnnnnnnnnnnnnnnnnnnnnnnnnnnnnnnnnnnnnnnnnnnnnnnnnnnnnnnnnnnnnnnnnnnnnnnnnnnnnnnnnnnnnnnnnnnnnnnnnnnnnnnnnnnnnnnnnnnnnnnnnnnnnnnnnnnnnnnnnnnnnnnnnnnnnnnnnnnnnnnnnnnnnnnnnnnnnnnnnnnnnnnnnnnnnnnnnnnnnnnnnnnnnnnnnnnnnnnnnnnnnnnnnnnnnnnnnnnnnnnnnnnnnnnnnnnnnnnnnnnnnnnnnnnnnnnnnnnnnnnnnnnnnnnnnnnnnnnnnnnnnnnnnnnnnnnnnnnnnnnnnnnnnnnnnnnnnnnnnnnnnnnnnnnnnnnnnnnnnnnnnnnnnnnnnnnnnnnnnnnnnnnnnnnnnnnnnnnnnnnnnnnnnnnnnnnnnnnnnnnnnnnnnnnnnnnnnnnnnnnnnnnnnnnnnnnnnnnnnnnnnnnnnnnnnnnnnnnnnnnnnnnnnnnnnnnnnnnnnnnnnnnnnnnnnnnnnnnnnnnnnnnnnnnnnnnnnnnnnnnnnnnnnnnnnnnnnnnnnnnnnnnnnnnnnnnnnnnnnnnnnnnnnnnnnnnnnnnnnnnnnnnnnnnnnnnnnnnnnnnnnnnnnnnnnnnnnnnnnnnnnnnnnnnnnnnnnnnnnnnnnnnnnnnnnnnnnnnnnnnnnnnnnnnnnnnnnnnnnnnnnnnnnnnnnnnnnnnnnnnnnnnnnnnnnnnnnnnnnnnnnnnnnnnnnnnnnnnnnnnnnnnnnnnnnnnnnnnnnnnnnnnnnnnnnnnnnnnnnnnnnnnnnnnnnnnnnnnnnnnnnnnnnnnnnnnnnnnnnnnnnnnnnnnnnnnnnnnnnnnnnnnnnnnnnnnnnnnnnnnnnnnnnnnnnnnnnnnnnnnnnnnnnnnnnnnnnnnnnnnnnnnnnnnnnnnnnnnnnnnnnnnnnnnnnnnnnnnnnnnnnnnnnnnnnnnnnnnnnnnnnnnnnnnnnnnnnnnnnnnnnnnnnnnnnnnnnnnnnnnnnnnnnnnnnnnnnnnnnnnnnnnnnnnnnnnnnnnnnnnnnnnnnnnnnnnnnnnnnnnnnnnnnnnnnnnnnnnnnnnnnnnnnnnnnnnnnnnnnnnnnnnnnnnnnnnnnnnnnnnnnnnnnnnnnnnnnnnnnnnnnnnnnnnnnnnnnnnnnnnnnnnnnnnnnnnnnnnnnnnnnnnnnnnnnnnnnnnnnnnnnnnnnnnnnnnnnnnnnnnnnnnnnnnnnnnnnnnnnnnnnnnnnnnnnnnnnnnnnnnnnnnnnnnnnnnnnnnnnnnnnnnnnnnnnnnnnnnnnnnnnnnnnnnnnnnnnnnnnnnnnnnnnnnnnnnnnnnnnnnnnnnnnnnnnnnnnnnnnnnnnnnnnnnnnnnnnnnnnnnnnnnnnnnnnnnnnnnnnnnnnnnnnnnnnnnnnnnnnnnnnnnnnnnnnnnnnnnnnnnnnnnnnnnnnnnnnnnnnnnnnnnnnnnnnnnnnnnnnnnnnnnnnnnnnnnnnnnnnnnnnnnnnnnnnnnnnnnnnnnnnnnnnnnnnnnnnnnnnnnnnnnnnnnnnnnnnnnnnnnnnnnnnnnnnnnnnnnnnnnnnnnnnnnnnnnnnnnnnnnnnnnnnnnnnnnnnnnnnnnnnnnnnnnnnnnnnnnnnnnnnnnnnnnnnnnnnnnnnnnnnnnnnnnnnnnnnnnnnnnnnnnnnnnnnnnnnnnnnnnnnnnnnnnnnnnnnnnnnnnnnnnnnnnnnnnnnnnnnnnnnnnnnnnnnnnnnnnnnnnnnnnnnnnnnnnnnnnnnnnnnnnnnnnnnnnnnnnnnnnnnnnnnnnnnnnnnnnnnnnnnnnnnnnnnnnnnnnnnnnnnnnnnnnnnnnnnnnnnnnnnnnnnnnnnnnnnnnnnnnnnnnnnnnnnnnnnnnnnnnnnnnnnnnnnnnnnnnnnnnnnnnnnnnnnnnnnnnnnnnnnnnnnnnnnnnnnnnnnnnnnnnnnnnnnnnnnnnnnnnnnnnnnnnnnnnnnnnnnnnnnnnnnnnnnnnnnnnnnnnnnnnnnnnnnnnnnnnnnnnnnnnnnnnnnnnnnnnnnnnnnnnnnnnnnnnnnnnnnnnnnnnnnnnnnnnnnnnnnnnnnnnnnnnnnnnnnnnnnnnnnnnnnnnnnnnnnnnnnnnnnnnnnnnnnnnnnnnnnnnnnnnnnnnnnnnnnnnnnnnnnnnnnnnnnnnnnnnnnnnnnnnnnnnnnnnnnnnnnnnnnnnnnnnnnnnnnnnnnnnnnnnnnnnnnnnnnnnnnnnnnnnnnnnnnnnnnnnnnnnnnnnnnnnnnnnnnnnnnnnnnnnnnnnnnnnnnnnnnnnnnnnnnnnnnnnnnnnnnnnnnnnnnnnnnnnnnnnnnnnnnnnnnnnnnnnnnnnnnnnnnnnnnnnnnnnnnnnnnnnnnnnnnnnnnnnnnnnnnnnnnnnnnnnnnnnnnnnnnnnnnnnnnnnnnnnnnnnnnnnnnnnnnnnnnnnnnnnnnnnnnnnnnnnnnnnnnnnnnnnnnnnnnnnnnnnnnnnnnnnnnnnnnnnnnnnnnnnnnnnnnnnnnnnnnnnnnnnnnnnnnnnnnnnnnnnnnnnnnnnnnnnnnnnnnnnnnnnnnnnnnnnnnnnnnnnnnnnnnnnnnnnnnnnnnnnnnnnnnnnnnnnnnnnnnnnnnnnnnnnnnnnnnnnnnnnnnnnnnnnnnnnnnnnnnnnnnnnnnnnnnnnnnnnnnnnnnnnnnnnnnnnnnnnnnnnnnnnnnnnnnnnnnnnnnnnnnnnnnnnnnnnnnnnnnnnnnnnnnnnnnnnnnnnnnnnnnnnnnnnnnnnnnnnnnnnnnnnnnnnnnnnnnnnnnnnnnnnnnnnnnnnnnnnnnnnnnnnnnnnnnnnnnnnnnnnnnnnnnnnnnnnnnnnnnnnnnnnnnnnnnnnnnnnnnnnnnnnnnnnnnnnnnnnnnnnnnnnnnnnnnnnnnnnnnnnnnnnnnnnnnnnnnnnnnnnnnnnnnnnnnnnnnnnnnnnnnnnnnnnnnnnnnnnnnnnnnnnnnnnnnnnnnnnnnnnnnnnnnnnnnnnnnnnnnnnnnnnnnnnnnnnnnnnnnnnnnnnnnnnnnnnnnnnnnnnnnnnnnnnnnnnnnnnnnnnnnnnnnnnnnnnnnnnnnnnnnnnnnnnnnnnnnnnnnnnnnnnnnnnnnnnnnnnnnnnnnnnnnnnnnnnnnnnnnnnnnnnnnnnnnnnnnnnnnnnnnnnnnnnnnnnnnnnnnnnnnnnnnnnnnnnnnnnnnnnnnnnnnnnnnnnnnnnnnnnnnnnnnnnnnnnnnnnnnnnnnnnnnnnnnnnnnnnnnnnnnnnnnnnnnnnnnnnnnnnnnnnnnnnnnnnnnnnnnnnnnnnnnnnnnnnnnnnnnnnnnnnnnnnnnnnnnnnnnnnnnnnnnnnnnnnnnnnnnnnnnnnnnnnnnnnnnnnnnnnnnnnnnnnnnnnnnnnnnnnnnnnnnnnnnnnnnnnnnnnnnnnnnnnnnnnnnnnnnnnnnnnnnnnnnnnnnnnnnnnnnnnnnnnnnnnnnnnnnnnnnnnnnnnnnnnnnnnnnnnnnnnnnnnnnnnnnnnnnnnnnnnnnnnnnnnnnnnnnnnnnnnnnnnnnnnnnnnnnnnnnnnnnnnnnnnnnnnnnnnnnnnnnnnnnnnnnnnnnnnnnnnnnnnnnnnnnnnnnnnnnnnnnnnnnnnnnnnnnnnnnnnnnnnnnnnnnnnnnnnnnnnnnnnnnnnnnnnnnnnnnnnnnnnnnnnnnnnnnnnnnnnnnnnnnnnnnnnnnnnnnnnnnnnnnnnnnnnnnnnnnnnnnnnnnnnnnnnnnnnnnnnnnnnnnnnnnnnnnnnnnnnnnnnnnnnnnnnnnnnnnnnnnnnnnnnnnnnnnnnnnnnnnnnnnnnnnnnnnnnnnnnnnnnnnnnnnnnnnnnnnnnnnnnnnnnnnnnnnnnnnnnnnnnnnnnnnnnnnnnnnnnnnnnnnnnnnnnnnnnnnnnnnnnnnnnnnnnnnnnnnnnnnnnnnnnnnnnnnnnnnnnnnnnnnnnnnnnnnnnnnnnnnnnnnnnnnnnnnnnnnnnnnnnnnnnnnnnnnnnnnnnnnnnnnnnnnnnnnnnnnnnnnnnnnnngccaagcctgaaaatcataagaagcaacttagcaatcctatatacttgtgagtggatctagtcgtaaatcttaattatttcatttgctcgttaacaagtataattgagaaggaattggtgagagaggaaagagaagcatatttcaatcaccgagtactgcaacatgcatcaatcataaagtaccactagtatgtgagcacatcatagctacatccagaaggatctaatacaaacaagttattttctgcaaaattagttttcttttgggttttaaagttctaacccgagggtaatcaataacgtgtagtgtccctctttagagcttcttaaaataatgtagtagaaaagtggttctcacatgcatgcatgtaactgctatcactgctgataagatgaatagnnnnnnnnnnnnnnnnnnnnnnnnnnnnnnnnnnnnnnnnnnnnnnnnnnnnnnnnnnnnnnnnnnnnnnnnnnnnnnnnnnnnnnnnnnnnnnnnnnnnnnnnnnnnnnnnnnnnnnnnnnnnnnnnnnnnnnnnnnnnnnnnnnnnnnnnnnnnnnnnnnnnnnnnnnnnnnnnnnnnnnnnnnnnnnnnnnnnnnnnnnnnnnnnnnnnnnnnnnnnnnnnnnnnnnnnnnnnnnnnnnnnnnnnnnnnnnnnnnnnnnnnnnnnnnnnnnnnnnnnnnnnnnnnnnnnnnnnnnnnnnnnnnnnnnnnnnnnnnnnnnnnnnnnnnnnnnnnnnnnnnnnnnnnnnnnnnnnnnnnnnnnnnnnnnnnnnnnnnnnnnnnnnnnnnnnnnnnnnnnnnnnnnnnnnnnnnnnnnnnnnnnnnnnnnnnnnnnnnnnnnnnnnnnnnnnnnnnnnnnnnnnnnnnnnnnnnnnnnnnnnnnnnnnnnnnnnnnnnnnnnnnnnnnnnnnnnnnnnnnnnnnnnnnnnnnnnnnnnnnnnnnnnnnnnnnnnnnnnnnnnnnnnnnnnnnnnnnnnnnnnnnnnnnnnnnnnnnnnnnnnnnnnnnnnnnnnnnnnnnnnnnnnnnnnnnnnnnnnnnnnnnnnnnnnnnnnnnnnnnnnnnnnnnnnnnnnnnnnnnnnnnnnnnnnnnnnnnnnnnnnnnnnnnnnnnnnnnnnnnnnnnnnnnnnnnnnnnnnnnnnnnnnnnnnnnnnnnnnnnnnnnnnnnnnnnnnnnnnnnnnnnnnnnnnnnnnnnnnnnnnnnnnnnnnnnnnnnnnnnnnnnnnnnnnnnnnnnnnnnnnnnnnnnnnnnnnnnnnnnnnnnnnnnnnnnnnnnnnnnnnnnnnnnnnnnnnnnnnnnnnnnnnnnnnnnnnnnnnnnnnnnnnnnnnnnnnnnnnnnnnnnnnnnnnnnnnnnnnnnnnnnnnnnnnnnnnnnnnnnnnnnnnnnnnnnnnnnnnnnnnnnnnnnnnnnnnnnnnnnnnnnnnnnnnnnnnnnnnnnnnnnnnnnnnnnnnnnnnnnnnnnnnnnnnnnnnnnnnnnnnnnnnnnnnnnnnnnnnnnnnnnnnnnnnnnnnnnnnnnnnnnnnnnnnnnnnnnnnnnnnnnnnnnnnnnnnnnnnnnnnnnnnnnnnnnnnnnnnnnnnnnnnnnnnnnnnnnnnnnnnnnnnnnnnnnnnnnnnnnnnnnnnnnnnnnnnnnnnnnnnnnnnnnnnnnnnnnnnnnnnnnnnnnnnnnnnnnnnnnnnnnnnnnnnnnnnnnnnnnnnnnnnnnnnnnnnnnnnnnnnnnnnnnnnnnnnnnnnnnnnnnnnnnnnnnnnnnnnnnnnnnnnnnnnnnnnnnnnnnnnnnnnnnnnnnnnnnnnnnnnnnnnnnnnnnnnnnnnnnnnnnnnnnnnnnnnnnnnnnnnnnnnnnnnnnnnnnnnnnnnnnnnnnnnnnnnnnnnnnnnnnnnnnnnnnnnnnnnnnnnnnnnnnnnnnnnnnnnnnnnnnnnnnnnnnnnnnnnnnnnnnnnnnnnnnnnnnnnnnnnnnnnnnnnnnnnnnnnnnnnnnnnnnnnnnnnnnnnnnnnnnnnnnnnnnnnnnnnnnnnnnnnnnnnnnnnnnnnnnnnnnnnnnnnnnnnnnnnnnnnnnnnnnnnnnnnnnnnnnnnnnnnnnnnnnnnnnnnnnnnnnnnnnnnnnnnnnnnnnnnnnnnnnnnnnnnnnnnnnnnnnnnnnnnnnnnnnnnnnnnnnnnnnnnnnnnnnnnnnnnnnnnnnnnnnnnnnnnnnnnnnnnnnnnnnnnnnnnnnnnnnnnnnnnnnnnnnnnnnnnnnnnnnnnnnnnnnnnnnnnnnnnnnnnnnnnnnnnnnnnnnnnnnnnnnnnnnnnnnnnnnnnnnnnnnnnnnnnnnnnnnnnnnnnnnnnnnnnnnnnnnnnnnnnnnnnnnnnnnnnnnnnnaataaattattcatgattttcttctagttgcacaatttttaattttcttttatatattgttatgtatatgtcgatatattaaaataaaatataatacatattgataaaataaaataatttattgaagcaagtagaaaatttttatttaattcacaggataaataatttacctgaagttacattaatgtctacatcattattatgattgaattatatttttattataataattaaaattcgaatgtatattttatgacagtatttttcttatttaaataattaatttaatattttattttatgaccatagaaagtataaaaaaatataacaaatgaagatggatattttttcacgaaaatataaaaataaatttagatttaacttatcttataaaatataactcacggtgttgaatattttttaatataaaaacaagtaggaaaattacactaaattcacaaggataagctttttttgctaaatattttttttctaatcaaagctataatatttattttacaaaaataatatatatttaattacataaaaatcaaatatcaacctaatcactatttctaaagcaaaataaatgtctaagaaatactatctctaacacattattatattaatacaaaattaattaaaaatattaaattgttaatccctcacacggatcaaaattcctagtttgagtaatagataggtctgcagttacaattatgttaaagattgtggaatgtatcgaaagaaatatatattttatttatatttttgtactttcatggtcatatgtggaatgattatgatttgtgccaatcgatctctcaagtgtcgaccaaccttgttagggcagcaatgatcaacataggtcaacactttggccttatcgcaaagccatgttatgtgttattggtgtaattacattgattaattaggtctctcaaatctttttattttacacaaggtctcccaaatcctagaaaaacttatactgaaactagtttaagaataatcttattaattttattgttaaattcatgaacattaatttttgaacatttttattactgttttagtcttttttcctgaatattttagtctctctttttttatatataaatatagtaatctattaaatctttaaaatattatacaaaatcaaaaagctttcacagcaattatactcaaaacaaatttagaaatttgtaattcgtaaatgtccctatcaccagaatctctgtacagtccaccaacctttgctgaaagatttttgtgtacgtatatgtgtattacgcatggctggagcaaataagtcaactaacaatatatagaattttaaaatataaatatatttatgtcaaatttacatgtgtcaaaacagtcaatcaaaccgtacggtttataaaaataacaaaatcaaattaataatcacccatttttttttttgtcaatttttttatttgacgtttagtttaattcaattttaaacacccgatcaactgttttgttacctttacacgttatttatttactattacatcgctgtactagtgtagtctactttcgttttttaccacttctatacatacctttctatttttgttagtgaaagcgactggtcatgatgtcgtttgtttaaactgatttcgcgtctgaaagcattcagaattaatttctcctgttttcacgcatatttttaaatgaaatttgtgagtgaaataaacataaatatattttaattattttgaataattttaaactaaatataccttcatttataacaacgtttttcgcttttccttttgtgtaactataatcgctggtaatttaatcacaaaatatcctcgcatttttttaaaaattctaaaaatttaaactctttctttgtaattatgttttttaaaaaaacatatactatatcacattttaaaaattatttaaattgattttaaaatatttctctcccactcaaatcaattctgatctacatctaaattaagcatgttcttaattttttaaataatagtttggataagaagaaggaaaatagaggggaaaaagagaaaaatatattattttattttgttgaaaaggtaaaaaaattaaaataaaactcaatttctatttccctctattttatttccaatttaaatttaattttttttttctcctcttactcttttcttacattccaccaaacattttttttattgaacactccaccaaacatggataagtatagaaaagtcatgaaaaaatgtcgtcatccatatttacatttaatgacgagtagatctaattatggatgaagtgaaggcgaagggaagaatttatagcaaaggccaaccagagaaagttgcctcaacccgaattttttgtctacttcgtcgtcctttgggagtttgtgggaaactaagaatccaagaggtaaaattaaatttgaactttatttgaaaattgattcaaagtataaacaaacaatcacaacttctcaatatgtagtagtcagtattgctgtgcaatgtatccacactgattactttttttccaaattaagtcaagcacaccctctacttatgctatcatatatgcaccctccactttatatgtattatttaatatttattaaaataaatatattaaatataattatattttctatatttatttatttattaaataattaaattaataaatattaaatgaaatgatataaaaaatatacaaaatattaaatcaaattaaaaaattaaaattacttccatttttaaataattaaattaaactaatttttagatttttaaaaattcttacaagaaatttaaaaaaattgaagaaattttaaaacataaaattataaaaaaaatgaaattaaaagaagatcatacgacttaattagaagtcatagacaaaaaaaaggcatacgactttaaagtcataacccatatattaaaaaaaagacaaatacgacctagaaatcgataatatatttacgacttttgtatagataggaaaaacaacttgaattatgatttcaaagttgcacatgaaaaaaaaagttgaagtcataatttttttgacgattttcaataaaaaaaattaaaatcatatgtctgaattagaagtcataccacttgctacgattaatcaccatttgataatttttttaaaaattatcccccaatgataattaattttaaaatccacccatatttggtcaaaaagtctatgtatagtgagtggagggcaaagtggacaatcaaaactttagcatgacgaaagagacaagctttctttatgcaataatttaaatcactgatcacactagccacatggtttgttatgagtccatgccttacggtcccaggatactgatgcttttaggggttatcttttgtttatttattgaaggttttattaaacacacgtttgatgaatgtcttatatatagcatccatattccatgactatatatatattgagcgatttagtattggacgaaggtaggtttatgtgttaggtgttcaatttgatcggataataaagtgtccactttgcaataaataaataaatatatatatatggccgtaattgagacagtgagattagccatagtttattcaatcctgctgcatatgttcacctgtttgtttagaaacattctgctgcagttgcattattattttataaacaattcaaggagaattcgtattatgtaccccaaaaaaagaagtgaattcgtattatttcacatggcatgtcacatgagtgccatatccatatgtagtgtaagcaccaatccagctcatacatcaccgctggttagaaatagctaaacattataaactgccccctacaaatatcactgtcatcctcttaccaaaagacacacacttctacatctgtgacttcatttggcttcttcagttcttcgtgtattgtttggtttaaaagaagaaagagaagaattttaatgatgatgaaagaaaagagttagattttaatgagttaaagaaatatcttatttagtttatgggggcagggcaaaaaaaagaagaaaaataaataaatttagtgttaatagttagataaatttgtttaattcagaataatttagtccaattaatataaaaaattctctcatttttagatctcttaaccgtaaggtgtcaaaatggagtgagacaaaattttagctttctctatctcctcctgccaatttttttttaagttttaaccaaatgttaaaagcttaacaaaatacatgatctctatttccgcatccaaacaatgtcagaatggattgagaaagagtaagcagcgctatatattatacttaattttgaagaccaaagtcacgtagctatcaaatagctagatatatatggaattttgctttcgcaaataaaatgattttttactattaagttattatattttattctaaaaaatgtacgtccgtataggctaaaaatgtcatgcatagtatcaaaattcaaatccattctcaaaaccggggacaaatatccttagcagatattgtcccacggtcctagcaactagcaaatcaactgttcaaaatgagcaaacactaaaaagaattcaaaagaagaaaagatgaaaatgaagaagaaaaataaaggatattctttactctttactgtatataatgctagagatatttttaagagtttttttatagaattttatttttatttttaataaaaattctaaaaaataattataactgcatcaaacgttccatgtcacgaggtatgtacgacagatgatttggcagtgtggatttcacactgtcgttagttgtgaacttatcttcataacgagccagcatgtgtttgttggacgttgacgtgtctagcgcaccacagctacctacgctgttgtgttgtgtgtgtctcgtggggccaaacccataccaaaccaacactgccacactaacacgtgattttattttcgattaaaggaataataaaactgctgagtcatcagttagttcacgaatcagatcagaatctttcaagtcattataatgcaattccaatccccgtgtggctgtggaatctcatttcaaagttcaattaaagcggccatgatgccagccatcgcttgcacaacttgccaaaaatctttaatccgtcatttcttgtcaaagttcaaccaagagaatagcaaaataaatgacattgtgagtgtagacttccaattctgagtatataattgttttaaatatttaaaaagataattttattatctataataataataatatttaatttaaattagaattatctttctggtaaaaaatacgtgttctaaaaaaatgacattgatcataaataattaagtttatgaaagtcttctttatttataatctcacatacttaaaaaaaaaaaaaacgtaggaaaaatgacattgggcaaaagtctcaggatatatcatccaaacgcgataagtacgtaatcatatcataattaaattgaaagtaatatgaataatatagaatcaaaaaagaaaattcgatgcatgcatttggaatattggctatccatgtacatccccatctgtggaagaaagcaccttggagaacaggatgccatcctaatcctattgtcatttgttattggggagaagtgcaattgacccactagagttgttgcaaccatggttggaacttggaaacttggaatcattgtgtcaactgaagaactagtatatgactaataggatggaataatataaaatgaggacttaagtaggcatggcaacgagacccgagcccgtgggtacccgtcaaaatccgctccgattttaacggggaaaaatcgaatttgttattgatgatacctgcctcgcccccgccccgcgacaaaaattcggggacgggaacgggtttggtattgatgatacccgccccgtctcgccattaggcatgacaacgagacccgagcccgtgggtacccgtcaaaacccgcctcgattttaacggggaaaaactgaatttgttattgatgatacctgccccgcccccgccccgcgacaaaaattcggggacggggacggatttggtattgatgatacccgccccgcccccgcccccgccataattaaattacaaatttacccttatatataataataaaatcccaaaaccctaaccctccccctcatttctcattctcgatgacgctgaaccttggccaacgactttctgaattaattccattttggaagctttgttgctgcaatggacctctactctttgttgtgttttattttaattttggaacaatatatatttaaatgatattatattttgggagaaattaaatatgtagatccataatgattttaattaaattgattgattttgtttaataaattttaaattatgatctcatattttgaatgtgagtttgttattaatttttttgttacctagtcaactttttttccgtttttttcaaaagaaaaaccatattattttttatttttatttttttaattaatagtaggggtggggcgggggcggggcggggaaaacccgaccccgacggagacgggatgggtctggattttataacccgatggagaatggggacggaggcggggacgggttttaaaggcgggggcggggacggggaatacaataccctcacccgccccgccccgttgccatgtctagacttaagactcgaaatactaccaaaacagtgttttatatatatatatatatatatatatatatatattaattcaagttattgtcagtttataagtattttcctctcttaaatcactaaactaggagtttttttgtcgttgaactaaaccttttaagagataaataaaagataaaacagataatgtttcaaatatgttgaatataataatgtaacatttaaataaaatattagttaaagacataaagaccaatctcacacatgagattattaattaataagccctttagctctttaacctggattgagcggtcattattccatatcactaaaatgtcttaggtttaatgaaaattgaagccaaagacaatttataaacaacctcctcttaactcatggaggagtcttttaaaagacaaaatcatgaagacttataagaaaagtaaaaaatatcaaataatcctaacaatatgctattaaacgtttgtgttaaaatggcctaagccacgcgtgagactttataaacaaagatgtgaagtttaaaagttaaagtgaataatatctccaataaaacgaacctaacaatataacatatttgagcaatttgagtggaacattagtccttgaaagaaggcctaagtcacatgtgtagttgtgaaaccttctagtgtcatgaaaaatctataacctacacactcttttccctcatcctattgagatgccttttaaaggataattttaaaggtctatgagagtcaaagtgaacaataccttaaatatcatgggtccacaatataataaatttgttaagccaacattaaaggaatgcgtaggctacacatggaattgctatgccctttagtccttaactttgaccgaagactattaggtttttatagtgttcaagtcaaatcaattgattgacttttggtttaataacatgtttgtattttgaactcgtgaacatgatgattcgataaaaattaattatttcgttatgatgtataaaaaaaaaatttttaatttatatttttatagtgaaaacatattagtcttgtttaatctataggacgtctttagattttaatttttacctttctaatattttttacccatatgactcatgtggccattacgtaaaattaaagtaggccctctttaatttatttgttttttctgtgtgtgtatgtgtcagtgtgtgtgttttaggtggtcttgttaagttgagtaaatattaaacctacactttttaattatcaatgagctaccttgcatgttgatcaaagttttagttagaaattacttcaaatgattgtcgttataactttgtcttcatacttttgccttgagaattgtgactggtcaaatctaatgtgaagtcccattttttggctttatcggtgaacccctaattttataggtaataacaagtttgtaattgaaaaaaatataaattaaataaaaaataaattaaacgttaatttatttttattttctgtttttttatctccttctcgtgacagtcttctcttccattttgacttcgccggcaactccctccaccaccacccctaacctcctttctccgtcattaacccaccacacccacaacccagcattggaagagtgccatatcccaaatctgtagccacgacctccccgcattctccgacgctctccctgcttgttgcacttcatcctctctgaccactcttctccggtcaaggccgtcagcctcattgcaccatcgctgtcgctaacaaggcacctccgtagcagagcaagcccatatcgtgtgactctccttccgtcgacttggaattcatactactagtagcagagcaccgccgtcatccgcctcctagctggcgacaactcctaccaccaccagtccaccaccacaccacaatggcggcgcaacagtgaggagcaccatgaaagaaatccaaagcaccaagaaagaacatgaaaaacaggggaaaaaaaaaaagaacatttaattgacctcaccgcagtgtcaccatatctctggctcctcctcacggcagatggacacttagtgtttgggattttgttggtgaagaaaggaaaaagagggaacggtggttgtggcgggggagagagaagaggggaggttgtgtgcgtgaaagttgctggaaaaagactgttccgacactggagatgctcggcaggtgaacaattgacggtggcgtggttgtggattccggcactgttcacctaacttttgcttttaattttttttttttaacttaatcatcaggtaaccgataaacaatctagaccgttcattttgatattaatatattcaacgatattgagcattgcttcatcaatgaatcctatttttggacttcaggttagacttaatcattgggacttcagttgtactatgtgtcaaaaaatcaaaatgagagaggtttgcactttgcatgtgttaatattaaggcgagtaaaatacatagttaattttgacgttaccgttttttttaaaatgaaaattttgactttaccgggtacccattcgttggatgctcttggaatatttggggaaacagacgacaagttttatttataattctgttcttattaataagtgccatcttgccccctttgaaaattaaaaaattgttttgcattgtttacaaattattataaccaattttcaattcattgtgttcttgggcgtggttaattagttaaaggaaaaaaaaaggaatgaaacaatcatttaagccactgaatcatttaaggtgtctccaaaatgttttgaatatactcttaaaatatttttttgttaatttaaattattaattaacaaactttattcttttataatatattgtttactcttaactttattagtaagattatataatttaaagacaatcatcaaaaatataatttaaatataaatatataaatgtttttttttttgttttgcatcgatgacatcttcaaccaatagtcagatattaaatgcatattgaatgagtattaacaaaattaattttgaataaaattggttttgtgaaattgattttagttaaaatttattttaaaatgatgtaatttatatctggatgttttaattgtaaaatcaaataagaagtgaaactcaacataatattttttattcaacataaaatttattcaaagttacttgaagtttgtgatttgcaatttgggaaaaaagggactggagtttgtgaaagatgannnnnnnnnnnnnnnnnnnnnnnnnnnnnnnnnnnnnnnnnnnnnnnnnnnnnnnnnnnnnnnnnnnnnnnnnnnnnnnnnnnnnnnnnnnnnnnnnnnnnnnnnnnnnnnnnnnnnnnnnnnnnnnnnnnnnnnnnnnnnnnnnnnnnnnnnnnnnnnnnnnnnnnnnnnnnnnnnnnnnnnnnnnnnnnnnnnnnnnnnnnnnnnnnnnnnnnnnnnnnnnnnnnnnnnnnnnnnnnnnnnnnnnnnnnnnnnnnnnnnnnnnnnnnnnnnnnnnnnnnnnnnnnnnnnnnnnnnnnnnnnnnnnnnnnnnnnnnnnnnnnnnnnnnnnnnnnnnnnnnnnnnnnnnnnnnnnnnnnnnnnnnnnnnnnnnnnnnnnnnnnnnnnnnnnnnnnnnnnnnnnnnnnnnnnnnnnnnnnnnnnnnntaattaaaatccattacattatgaaattaatcatattatttattgatagtgaaatgttaaaactatttaattataaaaatttcactaataactttgaagctaaaaaaagttaaaaataaaataaaataagaattgataaattataataaattatggttgagactttgttttattttgtttaaaactgttaaactttacacaatctaaactgttaaaatatgtaaagttcctgcaatataatgtaccttgtaaacatggattttctatctcatacttacattagcgtatgaattaaagagacaattttttaatataataaatataaataaattcttattattgggttttctttattaataaatttatttattttttatcatggaatagaaatatttttaacctcttaacttataaagttaatacatatataggataaaaaaattgtagcaaaaagttattgtgttgatgaaagcgttattacatatttaaatcccgaccaaaacatttactactagtccaagaggagtattactaaatgagaagtagaatattgtcattaattgaagtattgtcatgtcatgatttggagccatgtgggatgaaagaggaatccaaatcataattactctttgtcctatttggttttccggtttgcagactataaagtaatgtgacaaagtgacaaagagagaaggaatggaatgaggtaacaatgtcgacagaatgacaggattggagtagggttcacgaagtatatcgagattatacggatatttaaaatatttgtaagtgaaatggataattgttcataatattaaaattggatatgggatttggatattagagtacccaatccgttccattccacccgtacatatcatatttatatatatttacaaaataatatatatatatatatattatttatatataatttttaaaaaataattatatttttttatcactaatattagaagtgtctaatttctcataatatcactattaaagagtaataaatcttaaattattgtgttggatcattatcacataatggaaaattttaaatatttaatttgaatttttgctgaactatgaaaatattgactttaacaataattatgttaaatgattatttttgtaattttatttatttataatttgaattttaatggatcaatattatattttcttgtttttaatattacttgtgttacttttaatgttatgtttgagttatttaagaataaatttttactataattgtagtaatttttattgatttattattattaattttatatattagtaaagtacatgtcgcatatatagatatgaatatataaatatgagaataatgattaaaattactacatgcacatgtatataacctgatacaaattatttttaaacacaacatatatggaaagagtactattagacattactcatacctatgtattgttatccctagattggaaaagtaatatcaaatattaccttaatctaaatttacaaaaattgattgactaaaaggctccgagatttttatatcataatttaaaaagttttcaagttatagtcagttttaagtttttagaaattagttttttttagtttaaaaataaactcatttaaaaattctttattttgttaaaaattgtttaaggatatgtttctcatattacaatgatgatgtcaatatgaatgttagcaatgatggaagtgatctcacttgcatagggctagtgatgatggtcagttgttattaatggtgatgatgttagttaattttggtggtggtaacttgaaagagtcattattcaagtagtgagagtgcattattataaaaactaaaaatcaaattcataatttcttctctttttttagttttaaaaatgaatgtaaaaatattttaaaattgaattaaaaatcactttatctttattttagccaaacatgttttgtttgaaaattacatctgaaaattaaaaaacaaaataaataatcaactttgacttgtaaatttgatgtatattttgtaaggtttaatttaatttctttcaaaccttatgttagtttaatttaggagacaaaataaaaaggaaggagaggagtgggagtgtgataaaatgagatggttttannnnnnnnnntttaaaaataaactcatttaaaaaatctttattttgttaaaaattgtttaaggatatgtttctcgtattacaaggatgatgtcaatatcaatgttaagaatgatggaagtgatctcacttgcatagggccagtgatgatggtcacttgttattaatggtgatgatgttagttaatgttggtggtggtatcttgaaagagtcattatttaagtagtgagagtgtattattttaaaaactaaaaatcaaattcgtaatttcttctttttcttaattttaaaaatgaatgtaaaaatattttaaaattcaattaaaaattattttatctttattttttagccaaacatgttctgtttgaaaattacatctattagaaaacaaaataaataatcaactttgacttataaatttgatgtatattttgtaaggtttaatttaatttctttcaaaccttatgttagtttgatttaggagacaaaataaaaaggaaggagaggagtgggagtgtgataaaatgagatggttttataagttgtttagaaaggaaaaaagtgaaagaaaaaaacttcctcttatttggttgtacaaaaagtgagagaaatacatagaaccttttggacaaatttttagtttctcctannnnnnnnnnnnnnnnnnnnnnnnnnnnnnnnnnnnnnnnnnnnnnnnnnnnnnnnnnnnnnnnnnnnnnnnnnnnnnnnnnnnnnnnnnnnnnnnnnnnnnnnnnnnnnnnnnnnnnnnnnnnnnnnnnnnnnnnnnnnnnnnnnnnnnnnnnnnnnnnnnnnnnnnnttctcttacaaaaactaaatctccacatgaagattcaacatcctacttcaacaatggatcttaacaagatcagatcttaaggttaagatctcttagaaagatctcttattggagattaaacttgaaatagaacttcaaggcaacatttgtcatcaagcaacgctatcaaatttaattgtgtatcactatccaataattttttttctatcttttatatataaaacagataactaattcatcaaaaccaataaaaatagttaaatcagttagttttagttaataatatcataaattataattttattttaaaaatatttaaattaattggtttaagtaatgattatattttctttttggtaaataagtagtggttacatttaataaggttacatctccacaaattaatataacttatatcattaatagactaataaatgcatgagaaatgaatgaatgtctcgttaataaatttcacaaaataaattcccctgtgcaagacttatctatgttcttaacagttttgtttgaaatgtaagatgttaagttacttacttcaaagttttctgtattaagtttgaaaaacacctcaaggtcaaaaggataaaatttagtttgcctggtattttctacctatgaaaaattagctcagattatttctaccttgatctttctcaatacttaaaaaagtattttgcagggagagctactttagatatgaaccaaagtactaaaaagaaaacccaaacctgagagatgttccatagtctttaatctgggtaaaatcatattgtttatatgagatcttagcctctctctctctctctgtgtttttgggtccatgatttatatatctattcaaatttcgaaggctttacaacaaagggaaacctttcaaataaattttcaaaacatagaagacttttaagaaattacttatataaaaaaatagataatgcccaattaagataaagtgttctaagttttagccagagcagtgtcaccaacccatggttcaaaaatgaaacaatggatattattatttgcttaagagtattactaaatacactatataaatttcgtatacactatatgtgaacagtgaacggacaaaaatgcccttcgcgatttgaaacttacggatttcgttaccttcatacagattacggattgtcgaatccgtaagaatctcacgattttttttaagtaatacggattgtccaatccgtatggcccatacggattgtccaatccgtaggttttttcttttttaagttaaaatatattttttttaaaacaatttaaaataatggcacatgtagatttcaaacctgtgaccttcatgttttttaatgcgacgttccaaccaactgagctaataagtcaattatgttaaaaaataattaatgttgatacatataatactaaattttttaatgtatatttaatacacatatcttaatctttaattatttagtttatctaatttctttatcttttcttatttcagattcttattttattaattagagatattatgttcattttatcaattaggataattgttaggtatgatcctatcaaataagattctcttttattttaattttatcaattaatgagttatatataattaattttatttgaatattgaattattttgaatttatatataattaattttaattttaatgagaaataattcaatattcaaataaaattaattatatataactcattaattgatagaattaaaataaaagagaatcctatatgataagatcataactaaccattatcctaattgataaaatgaacataatatccctaattaataaaataagaatctaaaataagaaaagataaaaaaattagataaattaaacaattaaagatttagatatgtgtattaaatatacattaaaaaatttagtattatatgtatcaacattaattgttttttaacataattgacttattagctcagttggttggagcgtcgtattaaaaatatgaaggtcacaggttcgagacctacatgtgccattattttaaattgtttaaaaaaaatatattttaactaaaaaaaaaaacctgcgtacggattgggcaattcgtatgggtcatacggattggacaatccgtattacttaaaaaaaaaaacttacggattgccgaattcgtaagattcttacggattcacatataacgaaatccatatgaaggtaacgaaatccgtaaatttcaaatcgcaaagggcattttcatctatgcactgttcacatatagtgtataagaaatttatatagtgtatttagtaatactctttgcttaaccggtaaagaaaaaaatgtcaagactaaatggcccagaccaatggaaaaaaggtttacggtggcccaaacaaaggaagagaacatggattgggttgggcattttctttctatatcatttcattttctaataaacccaaacaatatcgagattatcctttattaaaaatttaagaaacttataacttgtcaaatctataatagatataccaaccaactaaattaataaattaattatggtaaaaaataattaatatcattatatataatactaaattttttaatatatatttaacacatgtataaatttacataattttttttaaataattaattttgatctaataattaataattaacgtatttttttacatataaaaattataatttaaataaaaaccataaatttaataaaaatgataggtttaaataaaaacggcattgggttgatatttgaactgtatcatttaattctttgctccgaacttcattcattttatcgctggcagctgaaaagtcaactctactctactctgcaactcattcctaggatttctacaccttgacaaatcctaggtactcttgtagtcttgttcgtttcatttggtttacgttagcatccacgaaactctggttgattttttttttttttttgtgtgtgttcacaaatgagaaacatattttcattattgttgttatcgttctttccgtctctgattttttaatgtttctaattatctgatttttcaatgtttctaactatctgatttttccttagttgtgaagttgaattgtgtccattatcattgttctgctttccatggttgaggattttaagcgaattaggagatttgggtgggtcagtttaggtaggtctggggagaacctgaattgatgaattataaatacttctgttttgtactgattaaaacaaaagtgcttttagttgagcagaagtacatgcacattttatgtggcaaaatttggcatattttgtgttgtgtgaatgtgagtgtcagtatgagaagtgtaccaaatgttccgtagtttatgcagtgctgtgttgttgttcctcatttaatttaggccttgtttggatttgtaaacacttacataagagaagagaagaaaataagaagataaaacaaattaaacttgaacttctcccataagtttgaaatcaaattatgtacttcaatttttatacaagttatctcatccaacttctccaaaaattgagatacataaagttgattttaacttaaaaagaagttatactcgtcttactttttatttcctccataaatgtttatggagaaacaggaccctagagaaatgtcttttggcatactttacttacctgttggctattgtcatccaatttctgttacgtacttcagaaatttggattgaatggagatgacaatgtgtcaatgtcaacaacaacttgttccaacatgattagattcagaggcattatcgggacagcatttgtatcaccatctcccaagaggaagcatgcaacaggaatcttgagaaattttaccatatgtgcctcaccatttatatctttacttgaccctataattgttcagtccccttcacttcaagtattggcttccaatctttcgctggccgatgtcccccaacggtcagaggagtggtttgcccttcgcaaggacaagcttactaccagcacatttggcactgcgttgggcttcgggaaagggagtcgtcgccctgagctctggcaagagaaagtgtttgcatcggagacacaaattatggaagcaaacaattccatggcatggggaacactcaaagaagcagtagctgtagacaatataaaaagatcacaggtgatgagatgagctcaatgaggtttgcagttcattcaaagcagtcttgtgactggctcggtgcctcccctgatggtgttattgggttcccctcacaacttgggatactggaagtcaagtgtccatataacaagggaaaacctgaggctggcttgccttggtcgagaatgcctttctactacatgcctcaaatccagggccagatggaaataatggattgtgaatgggttgatttgtattgttggacgccaaaggaagtactatatttcatgtgcttagggaacgtgactattggaacttgatacatgatatgctacgcgagttttggtgggaaaacgtgcttccggcgagagaagctctactgttgggtcgtgaagaagaggtgaaatcatataagcctgcatctactcaccaaaagacaggattagcaattgctaaaagcataaaattagctcatgaaacaaagttattttgcagagaacttgcaggccatgttgaattttatagctgattagagtttagaagtaataggttaagcattcattttgtatccaaaacattttcattttccaatgtgttagttgctttctgagacggaattggtgcttaagctactgcctttggcgcactattgtcttcagagctaacagcatttgtatagtgttgctcttcaaagctaacggcattttaccctcgtaagacgtttctgggtgaagcttttgtgatataggtgtttgtttttattttattttttgaggaaaaaattctaaagtggttttattattttgaaaattttctttctttttaaaaacagtgtaattattactacttttttaaaataaaaaaatactctcaagataaaccggtgaaaagattaatttgactgttatcgaaaaaaaagattattttgacttgcatgtctactaggaaaaggaaaaacatacaccatccacaaggacatgactaaaaataaggagaaatctatttaaagcagcatcaatttatattatgtaaatccaatgtgcgaactgagatgtagataattaagttatagtagtcttcattctttcttaccaccatagcattttggtcgttctgtcaatttggatcgattccctactttttcttatccacctaaacatttttttattctctagttttccaaacaaataaaaacttataagatacattctatagattagatattcaaactaaagagtccctctatattcatattcatttgcagtgacacatttttacctcttagcaacaactttttaaaatcttgcaataatcgtgccttagtttttgaatgactttaccacaccttttcatttatgctatgccatagtttgtttctccgtttcccctagcagcagaaagcaactaactttttaagaatctaatatcgtactctccaagttttcatatgcttgaacaattgtagcatctttctaaattaaccgagcagggaagaataactttcttaaatggccaacataggttgctaccaagacgtacatctgtgtttcggtgtaacataaactaacgtggcaatgtgtaggaaacaattctttattttattaactgcatttaattaatattaataaagttnaatgtgtaggaaacaattctttattttattaactgcatttaattaatattaataaagttcacttcaagccaagaaaaaaggacagtggggatgagggttttttttttttttccaggggtaggacaagcgtacttttctataacgccagatgccagatggtgaatattttacacaccgttaaaatgtcattatccttttagagccctcataatcaaggaagaataaatcaggataaatctcaatttcaaggtgcacggctgtaattataagagaaattctagacagtatgcaaattagataaaaataatcacaggatacatgtaaacacaggaatcattctgaacgatatacttttattatcacgattcattctgaacgatacatgtaattttgatactagaagagagttcttctagaagtcttattcattccatggaggcaaagcaaataaatagtacaagtaaaacaactaatcctgaggatctcttattcattagtccttgcacttcatctccacattcctttgtctttaccatttgaactttggcgagaaatactgcaaacataagaagaaagaaatgagtactgaaaatagcttgcagtcaaaggatagttattttattaaacaatatctaaattaagatatatgcatctgaaaagttttattgcccaccttctgaatgagcgacatatagtatggcttaactttttcaacatcaattcgcacattgctcttactgtagagatcatatttgttgtgttttgtattgcataatttataagaaacataatcgattccgttatatgttcgtcatgttaaggtgaagacaagatataaattgatatgctaaaacctaaagaaaaataattagcttactgaaatatttctagacacttcaagttcttaacatcttcactatacaggtgtttgtacgctcctgtctggtacaaagttgcaagattatatatatatatatatatatatatatatatatattgtaaattgcatgttatattgttatatatttgagaagggttatattagttcatagtagaacttagtaaaattaaatacgtatgatgaaaagagtgatatcggataaggaacaaatgccttaaaaaggtaaagtggtggtgtttcccttagcaacctgcttatagatctcaatgcgttattatgtgcataaattagataaagagtaatatataacatttctgtttcatttttttatattacatcaaaatctgtatgggatgtcggattaatatttgcatgtttatatcgactcaccaaatgtatgtactcatcatgttccaacgacatcatcacattgtccagtccgcagccttcggcatatatcccacttttcgtattataagctgaatttttgccatctgggttgtcctcgaagtactacaatgaattcaaagaaatatttttgagctgaatatataatcacaaatatttgtcatttataaggtttcttttattgagaaaattagtaagtacatacctttaagtatttgttcatgaaaagcacaaccaagatcgaggaaacaaatcttctacaacatataaaatggtaaattgattatttttcgtttggtttgtcagtagatacatacgatacatacgtgtgtatatatatatgattttcagaattttttatttgtacgaattccatttacatagtcaagaaaataagttgaaaggtcaatcatgaatagtattaattagtgaacaactctcatcaacaacagcccattgaagaagtccatcaaagcttggaaggagaagaacctttccgagatgtgcaaaccaacgaaaaccatcaagtcatgatcaataatgctttcaagataaaattcttctcattctttatgttgaaattttgcttctttttgaaataatgtaaataggtgaaagcaatataattaattaagaattagtatttaaataaagtttatatatgtgtgacgggtacaaatgggagcagtcaaatgtaaccaatcttcataatattagggtagtcctttctagtagcttcagctgtctctgcaagacatcttgaatttgagattcttctcaattaggatccctggcatccacaattttatcaacagcatctcacaacattcccatatacccattttccactctattcaatttcccatactcctccctcatcttcttaggctttgtttgggagttaggaggagaagggaaggaaagagattcaaggggaaggaaagggaggaaaatgaaagaagttctttcctccttatttaggagttaaaaatatattaagagaaggaaataaagaattaataagatacttttacaattttgcacttgaattgtgatttaatgctttgtattttggtgttttattaacacttgctggggtacgatagtaattttattaacactgactagagtaggatagtaattttattacttttccttctaaaaacccccaaataggggagaccacaatttttaggatttgaaggatttcagggaagttttaaaaatcctcaaattctttccctcaaaaattaaatctcccaaacaaggagatgtcaccaactaaacgtttctcttccctcccttcctctctaaaattcctctcccaaacaaaaccttaggcgcgcctgcaataatttagttacatataagatatattacctaagagtcattgtaaatattaatttgtgtatactattaagtttaaagttttgatatttgataataccatactgaaatacaaaataaattaatacacaattatttgacattgttgaaatcaaacttgcttacaaattcataattaagtttatgttgttgatagaattcttccacatatttttgcctttcgctttcaccataagaatttctattttttggagagaaaaaaacattgtcttacttagccgtcactttgcattggattatatgaaaagaactaatctataaaaatgtaacattacaattgaatgcaagcatgaaagaacgatttcaggaactataaattcatcatgtgaaggtgatttgaacaatgggaagtcaccatgcatccaacaccaactcattggtgatttcctgaggatgttcattgttctcctcaacttgagcccttgttggttgtggttgctcaaaaagcatttttcttaatatgagaagtaacagaagacaaaatgttagggaataagaaaatctcaatgaaattatgctatgactaaactggttgtggaagggagtatatataacctgcgtgattatattacagtcaatcatcatcacgtggaaaatctctaagaagggaaacaaatgctgtgctttatatacagtgttgacatattcggatgcatggaattaattgatacaaatgctctagctgctcaacttacgtgtgactgtcaataagggagtataaagggtcagtggcagatctagctaggatcctgggtcagtgacaacaattgagaatagtgtattcaaatatataaaattaaagagtataaaatatgaaaatattaaaacataaaagtagtggattcaaatatataaaattaggagagataaaatataaaaatattaaataattatatgtaattttttaaagtgaagaggtatatgtgcacaccctcactatgttgtatcagacaacttttcattgattagtaagtactacttttgtattcaatttttggatataaataattaaatattatctaactgtagctgttgatctttgtggcagttgtgcctaagagcatctttagtggtagattctaaattgggatcttagacaattttttgatagatcccatagtaccacataagattgaagatctctcaagacctttccattttgttctttaatggtagatctcattttgagatcttagtgagagagaaagaggaaaaaatttattcttttttgaacaatatgcagatcttaaagattcttttacaagaacttattctccatgttggagatctctctatctcttttattgggagatctaataaagaccagatcttgaactcaagatccttgctcaagttcttgcactaaagttactcttaataaatctatttgattgatggtaaactatcactggtaccctcatttatgttttgctgagataaaaaagatcatcatatgacaaatattatatttactcaataatcaaattgatatgtgcatatcaatcatcagcagctaaattgatatgttcctaacaattagcaaacaaatactgatttgcctttcaatccctaaaatacatcaaagattacattacagataatcacatggctattaatagcaataatatacacatcagccagtaatatttattgttatgtaaaataagaattatataaattacattaaaaatgtagtgaataatgaagtgtttaatagattactataattaactaagaaagactttatttagtaattgcatcttaagatgcattgtgaataaagtagcaactaaaccatgagatatacatattcaattgtaaacatcgaataaagaaaagtactaattccaaggccttctttccctcagattcagcatgtgaatcgtgaaccacttggcttatgcagctcctcaaaattcggtgcctcatttgttgaaatttgcagctcaagctgcaaatcctgcatcctctttatagagttttcgagttcaaggttcatatcatcgagtgctcccttcacatgaagaagcctttttaagctttcacttcttgaatctgctgtgcctcttcaagagtgcttagctgctcactacatttattcccagattaacaatctgctcttgaaaaaaaaaaacatcattatgatgggaaaacaataatgtcaactttcaattatgtatagcagcaaattctaatgagaggtttaaaaacaaataactgttaaaacaccaagagagtaactgatatcatcaatcatcagaataattactcctgtgattggtgaaacaacagcacttgcagcaaaattaacaatgattcaaacctagtgtatcaggacttgatttatctccaagacaatgtagccaaaaactcaatgtcgcagcatctgaacgctattaatgtagcttcacatctcacctgctacaacatggattgaaagttggcctctcccacaagtaccccatcaaaacaaacctcaattggttggagtcaaatgagcacaaacaatatcagctggtaaggtttactgaatttaaagaaataaggcaaaaacttggtgacaatgttctatctttttaacttttgagcatttgttttaagcataataaaacattattttaattgtgctttttagtttctccacttgatttggaatagagtgttgttcaaaacctctttattggggtctgtcatggttgtttcaagggtgttatcttttgcatttgcttgcattagccacccaaatacaggaagccacgatcccttctaggacaggttatcagtaaaacctgtcaaattgcattcaaaattgctcaaaaaattaaaaacatactactcagaaaggtacatcggacacgacactgatacttcgatacgagtaatgtttaaaatataggatatgggaacacaaacaaatctaatgaaatgaaatataagtaacatataacaaatatctaaattgatagtatattcatctttttaaatcaattttttatgatttttcaatgtataaattgtgtaaagataaagacttaagtattcaagccaataaatatatatttttaaataaatctaataagaagtgtcaaacatgggttcaacacggacacttcaaacaaaagatgtccgtgcttcttagaaaacatatacaagtaacttttccttttgctaaaaaattgtaatagaaactaggaaagcatacaaacagaaaaagtagaagcaggtcctttgtcctcaacgtaacctttgtcgtttgtctcctgtgtgtctcttgtgtttggtttagatggtagaaataaataaataaataatattaatttaaagcacactgtaaaagatgtaaatctcacgtaaaaacatgaaaagtataaaatttgtctcctatttctctatcctaaatcaaacatagcccatttttatgctcctcctagctagtgtttcatttttcattattcgtagacaaacgcatcctctatacaatagacgaatattttatcattaaaagtcatatttacttctctgatatatatttttattcaaatttcttgtttttttatacgtttatgcattaaattattcattgaattcatgatatgtgtagaatggagagtgcaagaataagccagcagatgaaccttctactatgtacactatcatgtttaatagcttaggaacatacgtatagatgttcaataacttagcagcatttttaaaatgttaacaaaaataattttataaatgttgcaataacttggcaacctttttaaaatgttacaagaacatatttataaatgttacaataacttgacaacatgttttaaatgttacaaaatgttagattgataacatttttaaaatattacaattaatatgcaaaaatgtcactaaaagtctttagtggcatagaatttatcttatatctgataaaatgtcgcaaaatataataaaatcatttattcataattttatgatatttttaaatatttccaaaagcatcttttgttgcagtgatactaaactataggggtacttttgttaataaacacaccatttgtcaatacaaaaataacaaaatgttccttggcctaaggaatcaaaactcagtttgcgaccaaaacttgaggtcatttgaacgcaaatgaggtttaaggtgatttgaacgtgaaagcaagcacattcatagtaatcctcccaaaagcttacacccaaaacacaaggcaacaaaaacgtaatttatggtttttgaatgacttttaccacaccttttcatttatgctgtgccttagtttatttctccatttcccctaacagcagaaagcaacaagtatttgttttaatgcactcatcttgggcaaaaggaagagagctaattgttgttaaagtgtcattatccttatgaatccctccatagtcaaggaagaataaatcaggaaaaatctcaattttaaggtgcacggctgtaattaaaagagaaattctagatagtatgcaaattagataaaaataatcaaaggatacatgtaaacacaggaatcatgccatttttgaagacgtccaacacaattacccaacaggttagacttctataatcaaaacatcaaatcattctttatttaagagacaatcgaggccaacataacaagaaactctttcaatacggatcggggaaaataggaacagaaacaaatttcccagaatatactcaagtagaaaataaatagtattcatttttaggtctcaagtctccaccataaatgaatttcacttgacataaacatggatatttaaagacatcataataccactttccttattttcccctccaaggatggcaaaaataaaaaataaacagggtacatacaccactgcctggcaagagtgaatttatcaatacagctaatgaaaaagtaaccataagtctaaaagatcagagtgttcagactggttatgcatgcattagagccaatcgcaaatgttatttgaatgtgatgttgcaaagcccaatgccccgactgcagccctcataacttcataatcacaacgtgccacgtaactgaaaaaccatagtatgcagtaggtgatcaataataatcatggtaatcatctggttcctgcaggttacactctagtagctgcaggaaaaaaaaaaaaaatgatgtcccactttctctacaagagaacaatccatgaatgaatcccacttccaagagaccaaatacagaatgccacacaactccaacagcacccaacatttcatatgacttccatcggagactttctcctcacaaagacttcttcaacaagatactatgacaaaccctagctttggtcatgaataacagctgatttatctgatccaatcttcctatcttctctttctgaacatttgactagctgcttagagcaagaagaacaaagcaattccagacaaaatgtttcctcatattcactatcattgatgcagcaaccacactggctacatctgggtatgcatagagtgcatgccctgcaaatctgagtagtgtgttccaccccttgacaactcaccgccggacaatcatacacaagcctcaaattctggcatagtggacaaacttcaatgtctatgactcgatcatcatcacaggaaagatacaagttgcccctgcaataatagtgtggtttgtgagagtgctggagcagtggactatcagcccccaacaagaaactcagctcttcaaaatgcttttgtgtaacaccataaagaccacctatgtgtaaatgcttcaacccttgggtacccatagagttataagcttttaaaatacccacaataccctcaatactgagtcttgtacatcctggaacacgcaactgcataattttgtggaaaaaaattacttagtagtaaaataggtacagaaaaaaaaaatctaaacctgagctgagctcctcaagtattcaatgctcagataatttattgcaataaaaagttgacacaggccagggattaaaaagcagaccaacagggcaacaataaatcacatgatacatgaaactataacgaacatcgtcaaaattactttaacaatacaagatctgtaaaattcataagaattatttaacctgaatggcatctaagcagtaaaagaagcttgaatgaatcaaagttgacagttgaagaactaattttttttatacaagttgaagaattaatttcccccaactagaatattagaattaacaatgcattaattgatacaaatagcaaaacaatagaatattagaacagtaaggttggcaaattaccaacacattcatacagttggagtcaagcatatactgcttaattattttttgccaaaaatcaagcatttcatatacctacatacctctaaaataaccccaaattgatttcctgtaatggaagacagaaaaagaaatccagaaacaaatacttatgaatgaagatggtgtaaaggtcaaatgttctgcacaaaatttacagacatgccaaactataaaaatgggtgcaaacaagtgccctaagggtgaaaatcaataaatagaaaattattatcaggaaccaaaattgtaaattattattacagtgccctagtgtattgaaaatcacagtgaaggtacattaatgatactaataaaatcttctcacgtttgattccttaaacaatgtcctaaagacacttataagcatcctgctataaaaaaatagaacaaaattcaacatttaatcaaaataaaacaacagcaccagctaacatgatccaattattcataaaacaacatttgcatactttagatgaatctaagtttcaatttgaaattaaccaacagacacagattgctagtgcatgttcaccttggttaacttgggattgccttgaagaacccgcttcaaaccatcatctgttatcctggtacactcgaccagactcaagcactgaagatgaccttgagccctgttggtcaattgaaaaagaacatcatcggtaattctctcattcaaaggcggatccacatgaatactcctccataaaagcggatccccacaaaccgtgaaatgcaaagatttacacaccctttcaacaacaagcagatcagacaaacccagataaccaagagaaaaactcaaggccgggtgaggagcaacatcacccccatctcctcccccatcccgtctcagaacatcaccagagacatcatcagacccgctcgtagcaggcaaacccgacacttcatcataattattaacagatccaaacccaaaattgctcgatgcagcagcagccccatcatttctcacagaaaaactctcgccaagccctctcttctcctcaacacacgacgcatgtaacctcatagcattgttccaaatgaaattcaacccagcaaaaagctggtaattgccatcactcgcgccaagctcgtcccttcggtacccaccataatcaacaatctccaaatcctcgagccacccggtgatggcggtgacggtggtgctgatgtccatgccgaagggatccgaaggcaaaagatcgacaatgtcatcgtggctcgcaccaccaccacctctatctctcccataatcaaaacaattatcaacaacactcttctctggaattcccatcctcatcggcgaaaccaaattatcctcagaaaaaatcggtcgatgagagaaattcaacgccatcgcatgtatctatcgacctatctatgtacacaaccctaaatcaataaacaaaccctaaatttttttcgagacgcttttttttttttttcttttccttctcagaataacagaacaatacaagatgaaaaggaaaaaaagtatggcactagcagagatctaacaagaaaaccctcgatttcggatggcaaactaaaacgacgcaccaaaaacttcacagagtttcttgcgaataacccaattgacaataatttccctaaaaaacagctagaatataatcagaggacggaaaatagaatcgaatatatccacagaacaaaaaatataaaattacaaatcgaaatccctactctctcttctttttttttgttttttgtctcgtcaacaaccgataggcctgaagattaaaaggggaagggaaaaagaagacaggataaggagggaaaaggagaagaacgaaagaatttacgtgagaaacgaaaacgaaaaggaagaagaagaaaaaagagagaaaccctaaattgaaaatgagaaagaaagcttatagggatggaattggaatcctgaagaatgagttgagaagggaaaagggaatcgcgtttcccctcgggtgggtgccgatgccgatcgagttcgcggtagcgagcgagagagaaagagagagaaaaaaatgatgaatatagtatatatatacatacaaaaaaaaatattatgaggaataagaaagaaagaaatttggggcccaaaataaaaatgagagagaaagagagagggtaacggtgaaatctcgagtgaaatacggggagatttcgaagagtgtgggggagggaacacgtggcggcaaaacaaaagtccttagaaactttcttaggcacttctcaatagggtgcatttttttaaaaaaattacaagtaaattttaaattaatatcaatttagaagaaattgtgacgccttttaaattcaaaatcataatatctgttataattttttaaaagtattaaaatctaaaattttacaaggtttcattttttttataaatatgactttaaagtcataacaattattattttgttttttacaattttaaattttgtaacaataattttttatgtaaagtattttttataaatcataaataattttttattttaattatttaaagaataaatatatgttttatttttttattttatttaatattttctatattattttgatatgatttttaatatttaaatattttattttatttaatatatttaatttttttatattttatatggatttttaaatatttttatattattttatttaatatatttttatattttatatttttattattgttatgaattattatttatttttaaattaaaataaaacttaaatataaataaaaatattaaaatccaatacaagaagataaaaaattttgactcatacccataagaacatgtgtgagacattatttaattattaatatttttattaaacgaatatgcaatacatcttactatttttatttaaatttaaacttttataatattttttttaatttacaaaataaataataactcttaaaaataataaaaatatattaaataaaataatataaaaatataaaaaaattaaatatcttaaataataaataataaataaaaccatataaaaatattaaaaaatatacattaattctttaaataattaaaataaaaaattatttaggatttgataagaaaataattattttacaattttaaatttataaaaaaataaattattacgactttaaagtcgtaaaaaaattaattattacgagtttaaaatgatatttaaaaaataattaaaatagtgtaaaattttactacttcaatatttttaaataaaaaaaatataataannnnnnnnnnnnnnnnnnnnnnnnnnnnnnnnnnnnnnnnnnnnnnnnnnnnnnnnnnnnnnnnnnnnnnnnnnnnnnnnttaattcagaagacataattgcaacttattcttgaataaatattaatttaaaatatacgcttaaataataatttttaaaaaaaaattacaccctattaatacttttgcccactttcttcgcaactcttatgtatgtggcgggagaaggaataactctttcgcatgtattgttaaagccaatcatccataattatcgacaagtggttagttcaaattcaaatagaattgaatttgaatttcttaaataatatctcaaatttaaatttatgaataaaaatatatggttaaaagatttattaaagataattagccaaaaaaaggttcatagttcattgaaatgtgaaaatttgtaaaaatcaaatattgtgagatgatattttattttgtagttatttgtgaaatgatatttaatatttctaaaaattggtaacttgatttttgtaaggtaaatggattcctctactgtgtgttgcatatttgttaaatctactttgttatatgaataaaaaaatgttttaatattttatgcatactactgtcattggtttaggtttttttaagagataataagtaaaatgtataaaaatnnnnnnnnnnnnnnnnnnnnnnnnnnnnnnnnnnnnnnnnnnnnnnnnnnnnnnnnnnnnnnnnnnnnnnnnnnnnnnnnnnnnnnnnnnnnnnnnnnnnnnnnnnnnnnnnnnnnnnnnnnnnnnnnnnnnnnnnnnnnnnnnnnnnnnnnnnnnnnnnnnnnnnnnnnnnnnnnnnnnnnnnnnnnnnnnnnnnnnnnnnnnnnnnnnnnnnnnnnnnnnnnnnnnnnnnnnnnnnnnnnnnnnnnnnnnnnnnnnnnnnnnnnnnnnnnnnnnnnnnnnnnnnnnnnnnnnnnnnnnnnnnnnnnnnnnnnnnnnnnnnnnnnnnnnnnnnnnnnnnnnnnnnnnnnnnnnnnnnnnnnnnnnnnnnnnnnnnnnnnnnnnnnnnnnnnnnnnnnnnnnnnnnnnnnnnnnnnnnnnnnnnnnnnnnnnnnnnnnnnnnnnnnnnnnnnnnnnnnnnnnnnnnnnnnnnnnnnnnnnnnnnnnnnnnnnnnnnnnnnnnnnnnnnnnnnnnnnnnnnnnnnnnnnnnnnnnnnnnnnnnnnnnnnnnnnnnnnnnnnnnnnnnnnnnnnnnnnnnnnnnnnnnnnnnnnnnnnnnnnnnnnnnnnnnnnnnnnnnnnnnnnnnnnnnnnnnnnnnnnnnnnnnnnnnnnnnnnnnnnnnnnnnnnnnnnnnnnnnnnnnnnnnnnnnnnnnnnnnnnnnnnnnnnnnnnnnnnnnnnnnnnnnnnnnnnnnnnnnnnnnnnnnnnnnnnnnnnnnnnnnnnnnnnnnnnnnnnnnnnnnnnnnnnnnnnnnnnnnnnnnnnnnnnnnnnnnnnnnnnnnnnnnnnnnnnnnnnnnnnnnnnnnnnnnnnnnnnnnnnnnnnnnnnnnnnnnnnnnnnnnnnnnnnnnnnnnnnnnnnnnnnnnnnnnnnnnnnnnnnnnnnnnnnnnnnnnnnnnnnnnnnnnnnnnnnnnnnnnnnnnnnnnnnnnnnnnnnnnnnnnnnnnnnnnnnnnnnnnnnnnnnnnnnnnnnnnnnnnnnnnnnnnnnnnnnnnnnnnnnnnnnnnnnnnnnnnnnnnnnnnnnnnnnnnnnnnnnnnnnnnnnnnnnnnnnnnnnnnnnnnnnnnnnnnnnnnnnnnnnnnnnnnnnnnnnnnnnnnnnnnnnnnnnnnnnnnnnnnnnnnnnnnnnnnnnnnnnnnnnnnnnnnnnnnnnnnnnnnnnnnnnnnnnnnnnnnnnnnnnnnnnnnnnnnnnnnnnnnnnnnnnnnnnnnnnnnnnnnnnnnnnnnnnnnnnnnnnnnnnnnnnnnnnnnnnnnnnnnnnnnnnnnnnnnnnnnnnnnnnnnnnnnnnnnnnnnnnnnnnnnnnnnnnnnnnnnnnnnnnnnnnnnnnnnnnnnnnnnnnnnnnnnnnnnnnnnnnnnnnnnnnnnnnnnnnnnnnnnnnnnnnnnnnnnnnnnnnnnnnnnnnnnnnnnnnnnnnnnnnnnnnnnnnnnnnnnnnnnnnnnnnnnnnnnnnnnnnnnnnnnnnnnnnnnnnnnnnnnnnngtgctaaagagattcaattaaaagaatcttacttactttatatgttttgaggttttaaaaagttataaataaaaaagatactgtgtcatacgtaaatgattaatgtggttattgacatattttcttgacttataagacacacacaaaaaaatagaaatattattcataaattagtatatacaattagccaattacaataacttcctaggttttgtgtaattatacaagtatcacatatatttttaattattatatttatctctcttataagaggtatttgtgtaatattttcaaacatataagatgttattagtataatattttcaaacttaaataaggcaagattagtgtacagaaaattaaaaaggtgaaattgcatgtgattttattaaagcttaggatatattacttgtaatgtagtccttgattttgcaaaattattattattattattcagtctccaaaatttaaaatcatcacaaattgacactttttagtggtttcaagttgttattatctaattttaaggatccaaatataaaattttataagctcaaggacccgattgtaattttcttttaatttagaaacttaattaaaaatttgcaaacaatttaaagacctagggatcaatataattttttaaaaataaaacaattgagttaatgatattaacatagtgattaaaagtgtcattctgtacttcataaaaaaaaaagtgtcattctgtaaaactattgtttaatagagtggaagaaaatggttctctccatagaataaaaattgcaccttaatttcctgtgatctcacgtgtgttgttttatggaagattgtatttttattttccggggctaccaaggaagaggcaatctacataggcttgatccagaagacttttgaaagagcaaatggacaaattaagtaagaataaaataaactgcgtaattccatattaaatgagcagaagatggttttgggagtaaatgcaggtgaaaatttggggggaaaaaatacttaggatttcccaccactggaaaatcaaaaaccaagtgtttgattttgtgttggacaaagtcaagaagaaactaaagggtggaaggagaaagacgttatttagaataggaagaagttataataaaatgcattatattattgcccaagcatttcccatcttttatgcaatgagttttgctttgcacttccaaaatcactttgtgaccacattgaatgcttaattaacaaattgtattagagaggaaacttcattggcttagctgataaagacttgcaaacttcattggtgattgaaatagagaaatgattttcagtattttttcttcatccgaggcacaatgtatataaataccctttagaagaagtatgaaggaatcatggcagcatgttactcgtattttaagagtaacttttggggtgaatgataatatatctaatgattttactttaaaccaaaacttgacacatttaaacttccttatgctcttagtgaaacgataatcaaatgcgtgcacgaatacatttaaattgtttattttaagattataacgtgattgatggaagaaaaagacattggtgttattgtttaagcatggctggtaatttaagtttataatattttattataaatttaataaagaaaataacattttggttatgatatgtattccacattttgggttgcttgcagaaggaaggtagcaacacgttggaagttgggacacgaaaactctatgtaagaaactatgaaacacccccaatgaaagatggccatatgctaatgctattttttcagacagtgatgttaactggtcaattttcaacccaataatataaccgactatatatccagagcatacggtaaattatctaaaatcatattaaaatatggttaaggtaattttagataaattttcacatatttatttttatgttaaaaaactgatttagatccaaaatcaattcagagtttaaacaactttgggtagcttttatattcgataaaaataaaattatactgaatttaactataaacttacttttataataaaaaatttcacataaatcatatcaacataaaattaattttaaccaaaatcaattttataaaattaattactttttaaaagcatttttttctcacgctcatccaaacatacttaattggtccaaaaccaaataaatctttaaatatggggtacaaagtcgactcataagtctatttaattctagaaaaatacacaaccctttagtattagacgtagaggaaaatgatattaaagtagaccgagttctttcttaaactatattagtttattatgatgaggagaatacactttctatttgcttgttcgagattctagaccttttaaaaaaccaacttatttacattttaaatatacattgctctatatttagtgatatgagtatagattctgatacaaataatgacctcgatcgtctccattgactaactactaaggatttcttttactttgtgttagcagagaatgatgaaggagggactagcatatttacaacacattgacactttttttttctggtatgaaaattgaaattcatttaaaggtagaacaaattaagctagacaataggcaatagcataatttatgccatgttctagcacaaaagtgtgatacaaaagtctccctaaagctatacagcccaattatagctacataaccaaaattgaggttatattacctaattcagtaataacaataaaattgcagtaacaataataaaaacaagaggcctgattatgctaccaattcagtatggagttttgaagatctagtatcaagatgattcattgaaagttgttatgtctcgacaactatgcccccatacacttactaaacaaggacacaagaaatgagtcaatgagaaggtgataatacctgagattcgtagtacctcctctatagagggggtaacaatacacaagtagttgatcagcagtggtaatttttctttatggcgcatacaaaaagagattatccttttgggtttctaaggttgtcgcttttatggatctcagccgtatggataaggcttatactaattcagtaatttatgattacccctactcagtgcattaaaattacactcttaaaataattagtaaaaaaatgttgcaaaagaatacaacattcatttgacaaaccatcaatgctacatcctatatgtattaatatacaatcttaaagtattcaaactttgatactttgttgcaatatataattagagaataatgtaagtttacgcccacaatatactacaggtcttgagcgttggaaaagagcacatccaaatcaaagaaaataatgcgttcagcaacagaaaggtgacatttcaatgattcccataaactcaaacaaattacgcacgacaagcttgcaaattgatgcttgcatctaacagatatactcattccttgaagcaaaactgacggttttgaattagaacccagtgtatgtatggaccctcatcttagtcattgaaaacagcattaacaaattgtcaaataaaaaagttcatcaaaaaccatgatcctatttaattcctcgatttctttcttgacttggatgaaggcttggtttgctcggaaactgcattctgcacagctcctttggagtttccctggtttgattttagatttgaactgttagatgaggcaccagtatcatgcttatctctaactacagcaccttgagaccctctcacttgagcagctcttttgtccttcctcttgggcctatatgttgatctctccctcttgggaagccacctttctggatctgggggaggacctggatttgcagggtcaaaccctttaggataccttggctttctctttctctttttcttagattttgtcttattctttccttcctcatatgtttcagggacaccaatacgaggagcatcaacttgtttcactccagaagtacgctccaagctgtccacatcaattccctttaaaccaggtagagccttcagttgcttttcataaagctctgccttagcaacatccatgcgggcaacggttgttaccagcccaactagtgcttctatgctttcctggcttttgacgagctgctcatagagttgagcagcatcctcttccttcccatgcctcagcttgaacaaagcagcttcttgcattatagtattgagcttattgtcctcagtcatagcattggaccaccatttagttgcagtgtcaagcacagcagctgcaccatcaatgtcaccagctcgttcttttaaagacacaagggtggcaacagtagcaggcatgtgttggatatccgatatcttagtgagagaatcggctgcaatatgtgggtggccagcagcagcagctacctgagcccgggctaagtgaacaactttggacttatcagggaacttactagcaaactgtgctaatatttcctcagcccttccagctttgttctctctaacaaagagggcagcttgcagcaataccggtatcacactttctggaaacatgtctggtaatgcagaaacaagttctcgtgcctacaaatagtaatgatcaacagtatgctcccttgcccagtttcaaaagaaagaatggatatacacaattgatgattcaagaaggacaagacagagaaagaagaaagacctgctcaatcttattggcatgaagaagtaaaagaatcctatttgcatatattgcttccttttcttttgctgaaagtttcaagtctagtccaggagctagtcgaaagctttgattctccttgtcttttaatcgatcaagtttccttaggctatcagaaacatcttttggacctttcagtgaaacaagattgttcacggccaccgcaattgatgattcatcagccatatctcgtttaatcacatctgtataagcttcaatagcatcttccttacgcccaagaagctgttcatccatgataaattaatatttccagctcttggaaaaaataatacttgtttgaaggagaaataaacttgagatctaaacatttacctgctgaacataggctaactgtacagctataggagacaattcaatttctatctcatcatcagccaagttatcttccatcaggacctcttgaccaattctgatccaaaatatatgaataaacataagtatatggcttaagttaataggttatcaattaatgagtaaggaagtaaagcaaacagtgacaacaaagcaaatttaaatgtaaattaaaacaatcaacaatgaaattcagattgtgcctcatttctagtatccccatctttttcacctttgaatccagaaccacagctcccagatcagagctctggtacaaatttgttcggatggatgtcccccaaattacagtcaaaagtttctcactcgcacacttgtcaaacaagaaaattaagatagaaacactatagaacttcaagggttcctccctgccctaaggctccagttccttatcctcactcacccaactgaattctccttctcactcatttccaactgcctcatagacagactattatcctgcaggtcattagcttgagtatttcccatccttccctttttgtacccttggcccaaatcactgcatgtgtttctagccatcatcacgtacatctcattcccatgagtctaccacaattaatacagcaaacttaaattgactgggcaaatggaagagacatagtcacatacatcaaacaataacatgccaaaaaaaaaaacaaatcatcaaggattcaaagattctctcaaatactttagatttcctaaatcgccaacaatacttaataaggataacctggccatacataaaactaatcctaatctcaacaaatctctactttgatgaatgtcttggaaatttataatagatccagcttgaagaaccaagctcctcaaaatcaaatggagaaggaatttttatctgccaaaaatcacaaacaataaataaatacttatggtctctctactcactattagatacacataaccttatctgtcaccattaatgcttctaagatgtccttcacactacccctcaagtagaagcctttcctctggtattcaacttttactgagcatcaaatccacttttaacaagagctacatcttaatcaacatgttactacacaacaagccacatgacttttaacaccattcatcaactacagtttatccaatcttttttccaagtcaaaccatcagatctaataccacttattaggatcaagggcatccagattcaagaaacgaatccagtgggcttgccaagatcacagcaatgggccagataccatatctcaacccaaaaccatgaggcattatgttcatggatcttttcactttatatggacctcaatttgtccatgcttttccaacgtgggagtactttactcacaccccacattccaatcatatttgatttcccaacttaaaggacctaattactattggtaaagataaaaaaatgtaagtttgtaccataaatttcaagtgcattaaatttctaaagaaagctctagaattcgcaggtacaagctccaaaagtgccgtagatatggtatctagcaactgataagtcagacataccacactcatattacagtgacaaagagcagggggggggggagattgttatactatagtatattagtattatatattaaccatgaaaatgcaggcaaatttgttcaatatcatgatttctataatcaaaatagcatatcaccttcggcctgacaataagagttgttctgcatctgtgtacttattccttgcaattaaagaacaagcagtgttgtatgccaattcaaagctgcttgttgccttaacccgaagtgaatccagcattccttgaacttcagatgacttgccagccataactagagcagcaacagaatttatttccatgttatcaatcttggaattttggagcttgtggtagatatctaagcaagcattcattttcccaagacgatacaatatctgacattccaaaagcatagtttcatcattgctctcttgtcttttcaaagactccaaagcttcatccaacttgttttgtctgtataagcagtatgcctatttagaaacaacaaagtgaaaaacagcaatcaatggtaagcattcatcttttctattagatcatgcatgaagcaatggtatgatgaactcaaacaaggttttctttcaaaacaattgaatctgtatggttcttttaaaaggagtggagcctgcatatggacttgaatttgtaaaaagataacaaattatacagacacagtgaaatacagaaacaattaatataaccaatttaagtaaaccaaataaatggaaaacaaatacatcaaacaagaacatgcaaaaaataacaaatcacctaaaattcgaactatttttcttgactatcaagttcactcatttataatttcctcgtctaagtatccaaataataaacatcagttggaaaaagctgctaagagtcccacatacagcagcagaatggttcaatttcataaaaaaaactcaaaactaaaaggttagacttcagagtcagacatttgataatgatttaataacaatttgcatctttgagtttgattggaggtatgctgcctaaatctttttccttccttcttcctcaatttctcttgcagtcacaagttcacacttactatcacactagaggataatctgcactattataccatcctaactgtaaaacccttccttgtccactaacctaaaatcctcagttcttattaacatgcattttaccatttccatccagtatcccgcaattccatgcttcttgcacttcaaccagctttttatttatttttatatctaattcaatccttaacctctaaacacacacgtaaacattcgaaatctacaaaactcatatagcaataagcacatcctcagatccgtttccaaattcgacaattgaccgacgaaaaagcagaaaaaaagcggaaaatttacgtgccttgaggaaatgaaaatcatcaagctgcttcttagaggactgaatggcggagagtgcgtcctcgacgcgatcattttttatcagcgcgacgaccttgcatcggagcgcgtcctcgtcgccgggagcaatggcgagaactgcgatgagaaaacaaatgaaggcttaggatatgattaaaacgaaaggcgtttgagaagagaagtgagattaattgacggactctgatcagtgagcttgacggcattgtcgtatgcggaagcctggatgtggcggttaagcgtggtaaagagatcttcgagggcaggaggaggagcagactgcgacggcgccggtttgggcttcggagccattaggtttcaggcagcaaaccaaatctctgaatcgtgccaacgccaattgacttgcgttttatgttgtgttgtgtggttcagtcgggaaagaaaacgggtcgggtgtggctgcgggggttttcttctttgtgttgcctatttttttttttttttaatattcaatttaatctataaattctaacatttgagtgttaaaagataaaaaaataaaattttatttctgaattttcaaaaaaatacaacaaaatcgtcttcttgtcaactctcttccttatcccaaatagatttgcctctggatcatgaaacttatttatctataacgtcatgtgtataaacacataatcacttcggttgatgatgaatataatgaactaatttgtcatcaaattttcaacaaactaattggtgagattgtgcacaatcgataccctccgactcacctccacttgtttagaaaaaatcaaagctctaaattgacaaaatgctagccaaagattcctaaataataagtttaggaacagagtttaatgtttattcattcataatataaaataagtttatattattatctaattataaaatatcgtttgaaaataatttaaaatagttattttaaaatttaataaattatcaaatttattatatataataaattatgatgaaaagattatttaaaaaaatttacaatcgtataaccatttttctcttatttaaattacacatatgatcaattttctatctaaccgatgattttgaacatctgatctgatttttaagatattaataaattatacttacactttttaataacttgttcaaacattacttaatatatctccctatttgtctatgcatttactgtaaaattttcatttttcctcttttactgtgacccacagggcaaaaattattgatatagttttgaatttttttactgcatatagttttaatttaattacaattaaaagttaacaaatttattatatatactactctgtatttttttatgatattaatttgtgaataaataatgatgtgaagttattttatattgttttgtgtataacttttttttttcaattgattcactttctcttgaaaaagatatagcatataatgctagtcttttccatctttttcctacataattgagattattttttataattaagtgagatcctatataaaactgacggtcatgtgaggttttaataattttttaagtaaataatttaataannnnnnnnnnnnnnnnnnnnnnnnnnnnnnnnnnnnnnnnnnnnnnnnnnnnnnnnnnnnnnnnnnnnnnnnnnnnnnnnnnnnnnnnnnnnnnnnnnnnnnnnnnnnnnnnnnnnnnnnnnnnnnnnnnnnnnnnnnnnnnnnnnnnnnnnnnnnnnnnnnnnnnnnnnnnnnnnnnnnnnnnnnnattttaattaaaaaaacattattatatgataaattgtgtgtagagagagatggagcgtttcaaatgtaaaactcctatgaaaaaagtaaatgaaaactttcaatgatagtgcttgtattacaattaaaataaatcgagtgagattaaaactcaattacgaacaccttttatggaattgagagacactactaaatttatgtttagaaaagatttataacgtatgtgtataatactctcaccatgtctaacgcagaaacaacactcaagaacttttatgtttttttttaaactaatgtgaaaattagcaagacccggaactgaataaatgatgctcacacactcaaatatataataaaatattttgtattgtttttaaatttaattacaataaaaactagatgaaaattttcaataatagtccttgtattacaattaaaaaaattgagtgagattaaaactcaattaggaataccttttatgaaattgagaggtacaacactaaatgatgtctaatgtatagaactcgagtaaatgacatcaatttgaggtgtcttatgaaatggcgccaccaaacagtcaaacacacagtttaacatactgacaacttcatgagttagttgcacatagtgaaaattagttaaccaaatgatttttctcatgacaaactatcaacaagaatctctatttagattaacgtctcctccaatctatatgtgacaaaaaaaactctccacaatttatttgttttttacactttttatgttattttttttattacacttgtgtaatcaatacagccgtatacctctcttcctacctagcttggcacattcaaataaggtgcatcaacttggtacaccactcttgctagtgtaagaagtatgtttattaggaaaatttaattcaaaaaaaatatattgagattatcttaatatcgttttaaatttttattactgcccataaaaaaattattactactagtaatagtaaaaagaaaaaagaaaaacaggccggctcgttttaaaattataagatagcgttgattatgacatgaaatactattatattccatatatttttatgattttaatttttctaatgaaatattatattttatttgtagtattcttattttttcagttttaactttttattattgtgttttttaaaaaatgactaactcactcttagagtagacatgttttcaatgttttaattatatttatttatttatcttaatatttttaaattgaataaaaataatatatttatcatcttaaaattatataaatatttaatatctataatataataaaaattaataaaaatattgttgggggatttaaaattattctagaaaattaacacccctcatcatgcatgttccattgggtccacttgcggatgaatagaccagttgatacgattaattattattgaaataatttatttaatgataatcattggtaattaataagtgtgcaagtgaatataatcagtgtcaatttgaagttctctttgtacattaataccattggtacataatttacaatgttcctttttaaattaaattgagtattttatttaactaccgagatgagtattttaggactgtagttattaattttcaaatttaattaaagagaatattagtaatacctataatgttatatctaattaagtgaagagtctaactcagatcataaagtattcaaaaaaaattatatttatcttcgattcatataaattaaaaaaataatattaaatataaaatttgttctaaatttcataagaaagttatactataaattgtatgaatcaatacaaaaaatgacaagaaaatccatcccatcttttctacattcatcttcatctctcgatctctttgtatttcttcatctcattctccactctattgtatcaatttttttcttctttttatttctcccctttcttaacaatcatatgcactgcataggagtgtttaaactttaaacaactaaacataattatcctagtatttagtttcacaacacttcttctgtttcaagccttggaaaatgtaaattcgacttacataagggtcttcgagaaacgaacaaaaacaaaggtccaaaccagacattatttatttatttttaattaaaaaattaatattaagatgcagctacccttgcttcattataatattaagatgattgagataattctaattatagtagtatatatatatatatatatagcagtagttatccttgttgcaggcaaaagcatccattgatataccatagtccttttagtcatacaaagcatgaaaatggagttgatatcaagagaaacaatcaaaccctccacgcccaccccttctcacctcagaattcatcccctctccttcgtagataacatcgtttttcgcaactacatccccttacttttcttttacaactcctccacaaaccatgaccaaacatccaaaatatcaaaactcaagaaatccttatcccaagtcttatcccgatactacccttttgcaggcaaactcagagatcaagtttccattgactgcaacgaccaaggagtgtcctttctagtcacaaggctgagatgcaacctatcatcaattctccataaccccacggaagcatcgttgaatcctttgttccccgatgaactacagtggaagcctatgaagaacaaaacttcaactatagtagccatacaaataaactgttttgcatgcgcaggaatagcaataagcgtgtgcatgtgtgacaaagttggcgacgccgccactctttcaaacttcatcaatgactgcggcacactcaaccgcgaaaaggaacaagaaacaaacattgagtgagtttgtttaaatttatctttttaaaagataaactgtttttctattgtgagtttgttcaaatcatttttttctgatttatttatcttaattaaactactttaatttaaaataagtaattttttttattttttttttggagacgaatcttatctttctatttttttttataaaaaaaaacatacatttttaaattatttctatttaaacaagctaagtcattattacccttcgcagttcccgggggttcactcttcccgcaagaaaacttacctgttttctcagaagctttgttcgtggaaaacgacgccgtttgcagaaggtttgttttcgaggcctccaagatcgactccctcaaagccatagtgtcctcccacaacgttccaaaccccacgcgcgtggaagttgtcagcgcgttgatctacaagcgcgcggtttccgctctagggttgagtttcaagacgacgtcgttccgcaccgccgtgaacctccacaagagaacggttccgccgctcccggagaagagcgtggggaacttggtttggttcctgttcgtgcttagcccttcggaaacggagctgcatgagttggtgctcaaaatgaaacaagggttgggtgagttttgtggcacgtacgtgaagaagtatggagggaaggataagggcatgtcgttcatctcggagtgtctgaagcaggctgcttcggttccagaggctggtggttcggatgatgaggagagtcaaatagtaaccatgttttgttgtgcgagttggtgcaggtttccgatgtacgaagcggattttgggtgggggaaaccggtgtggttcaccactagtgagtgtcccgtgaagaatagcattgttttgatggatacgagagatgggggtaggattgaagcgcttgtgaacatggaggagcaagacatgattaggtttgagagtgacgtggtgcttcttcaatatgcttctcataatcctgcggttggacatggtaattaagcttacgaatttactgcatgtttgacgcactttcaatgcagatccaaccactaaaaataaaatgaaaaaaaaaagtatttttatctcaaaagtaaaattttcattcaattttcaaacatgcactcaatatatgtttgacacttagtgtatgtttgaaaaaccagtgctaagacactgatcgtactttggatcgaaaagtacgtccttctttacttttgaaaacgtaagttggactgtgcttaccggcaacccaaacacctctttaattagccatggtaaagtcattataggaaagagttcggagatctctgcaatgcaatgtaatgtgtgtacacgaataattaaagaagaatttggtctataaacgttggagaaatattgtttatatgctattgttaatttgttattacttgttaagagagtttgacctgactcacctctatgcatgtggcactaaaaaatttaaaggatgagattgagcaattcatttttctaaaaaaaattgaaaaaccttttcctttacctgcaactacgcttttctctctttacagtgaattaattaagatagaaaaaactgcgatcaattaactgcacgcataagtgggttttatgagtgatggttttgtttttggtacgttgaagcccaaatttacataattgatgttaatttgaacagatgtcagacgcgttaatcaaggggtcaatttggatctattaaaaaaaatgagatcacagcttgcaactatctcatctagcaattttgccatggataactctatctattcatttgtcgtgtaagagtagattttttaagaatcaagtcatttttttttttgccaaacaacctcggtatattggattaattttgacattgttgaagtaaaaaagtatatctaagtttaaagacatttgtctgaactatttaggatgggattatttaatctcgtttttatttcaagagtttagatacgaatttagtattcctctatagtatttttttttagtgacacgatatgatatagaaaaatatagattttatcaaataccaatttgtttggttttacaactaatcatattgtgtctttacttgataagaaaatgtgcctatctcttcatgaccatattatactagtattattatttaacaacatgaaagagtccaaatatgttaaaaaatccgttttggtcctgtttcagctgagatcaagatcgattattccaattcgttgaaacttgtatcaatgattttattttttttatttctccatttttttcaaacagtcatattccctcctctccagaaaaaaaaatgaaaacagaagaaaaaataaatgaatgaaagagaaattaggagaaagtagagagagatagaggggctggagagatctggaaagaatatgagccgaagaagttcaggtatgtaaaatctagtcatctaatcattattcattagatatgatattcgttaaatgttataataattatctttaaaatcataataatgatggtaatcatcagtgatattacatattaaactcataaagtagctaagaaaaagtttacaaatccttgcattgcaatgtgcacaaataatgaattaagaatttggtctatcaagttatggtcatgttagagaaaaaaacataatttttactgtcacatgtaatttagtgggtcttagaagtaatcattagtttttcttgataaagaatcgtctctttttattcatgaccatatttttttatttaacaagatgaaagaatccaaatttgtgaaacagttcatttggtactagatccctatctatgctaaggaaaccccaacttatggtgtgtttgtaagctttggtcatgttaaagtaatgctaataaaaaataaattaaatcaaaccatgtttagtaaaattaagttaatgaaggataaagtcagagaataagtgcataaccatctgcaattataatttcagggattcttattctggaagtggtaaaaggatctttcaattatggtgatcataggacaaccatttgattaggatcagcagagctttctatggcaggaactgactgcttattaagaatcatgaaaatatgcattgaactatatgaactacaacagaagcgaacaaccatcagttaagctagttgatcaaagagattaagacagtgttaagaagttggaagcatttttatctttcaaaatgaatctaaaaaatagtatgtctactcaaggaattaacgagcttcaggtaatatcacgtttactaacacacttgttctagtatgtctactcaggtactcagactctcagcaaaatgcaaattcaaatgaaaattttgtggacctattttcttctaaaatacaaattacatctaggcttcaataagttttgtcataggaaaggagtatttccaaatttgaacaaattcggcaactgaactaggtttcatctgattatgtaaaggatataggaacatatatataacgatctttagttgcattactttgcattttcatggacaaaattaccttcaactcttgctgagaaccactgtgggcttacaaacacaagaaatgcttctccaaatattcagttattattaaaggaagcaagcttattgataagcttaatgtttgtcatcacacatcatccacttttatctgtgcttaaatatcaaaatcctttctaattggaaaaaagaataccccagccccttaaagttgatattcttggaaaggaagaaaagaaaagttcaaatagtaacagtaaatcatcctttcgtgcatttagttggatttttgttgaagatgcagaaaagggcagggcaagaccgatcatgctatgaatagactttgatctaccgatgaataatctgctgaatcataaaagtggctagggacttcagcaataagccttggatcataatactctgacatatctatattctgcaggccaaaattcatgttgtagcattcagtttgtagcaaaaagaaattcaggtcctcctccaaaggtgcagaagctgcctcaccacccaataataggtttctttggtaaaaatccagatcagaaatgcaatctagattaaatccctgagccttcaagctcaagtttgaggtgaaagtgggctctgaagattgatcattcaccataaggcttttgatttgactaggaaaggcttcaactgcagatcctattgaactcacaggactcacataatcactcttgaaaccagcatacaacggtttggtctctaatttggcagcaacctcttcttctgttatagaggcaatggaattaattgcggcaattgattgtgactgatcaacctgaatgtgatgctgtgtaacattaccatgcaatggcaactggctgaggctatcctctaactgaacaagtgtcttctgttcttctttgagtggcccttttggaaactcactccaagagtactgtgttggtatggtgcaatcaaagactgcatggtttgcttctgatgactctacagatgtaaaaggttgattgaggctcttctgtgaacttttttgtatcttggggtcaggaatgtcactagtggaacctcttcttttttctgttgtaggctctgacacaactcccttgagattaccttcatgacttgtggcatccatctgaagtagtaaagttccatctgaataactgaagctatcaatggcaacatcattttgttgcttgtttgcagtgccaagaatactaaaacttcctggatcttttgaaggtgaatccgaatgctttattctacctgaggaagatttctgatcattctccttttgcaacctactcaagtagagcctgtatttctgcaggacaatttttttcttatcaaggaaccccatgaatttcaaagttaaaagaccactaaacagtttttcctcccctatttctctttcttcacatttaattttatgagagggtcagcatctatgttgtaatatttctgaatctaacaaacatatactattttactcagaggaagggagaagaagaaaataaattcttccaaactttatagtggcagcaaaagttggagaggggagtttccttcccctcccctccaaacttctaaaccaaacaaggaaattttatcaaaatctctcccttaccttcccttttatttctcttccaaccacacagtatcttagaatgaacctacgtaatgattcaaggtctaacagaaacagcaaatcagaaatgatcactcacaatatggagtaataagatgcccagatgtttattgaaataaaggttatgactgaagtgtcctatttggcagtctttcaatcataatagttgaggactgttaatatagtatcacttaagcaatgcatatgagttagtgatatacctgcaagtgactagcaacattttctctagtcaaccacggaacattcatcagatctagaattttcttgggaccaacttctgccaaaaagaaattatgttatattcttgtacgtagaagataagagggttaacattaacaaaaagagtatgatcacaattcacaattatactttgtagggaaggttgataggaaacttactatcaaatccaatttgattcactgctttgacaaacttctgatgaagatccacagaccaaactactctggctttcttcatgggagaatgatctccaaattctttgtcatcatgtttgttatctgcatcttttcttttcttaattgaggtaatttcttctacagaaaacaggttaccatcatcagagtgatctgatccatttctcattaagtgaatgccctcgaagtcaaaaccctcgtgactttcaaaatctcttgcctcatgcatcctttttctaaagacatgttgccatatgtttcgcagttctttcatccttataggcttaaggagataatcacatgctccatgttgaacacctttcatcaccctgcttgtttctccatcaacagacatcactggacaacattgccaagtgtgactggtcagcatggactttttaagtcattttgataaaaaaataaattatagtgatatcatttaaagaaaaagttgaatatattattaaaagagaactgactgataacaggaagatccatctcgagtccaacttgctccagaagtttgaaaccatccatgtcaggcatgttcacatcgctgatcactatgtcatatgcatctttcctttcacgaagttttttcagggcctctgttgctaaacaacatgtagtcactgaagcatataatagaaatgagtcagaaggaaacaattgttgtcataacaagagcatacgtaagagacacaagatgtgcttgcttccaaaatttgccaatttcatgaaaatttgctaacatgaacatagtaacaacaacagaaggaggatttcaatttggaagttactaaagacgtccactgaataaaaagcatgaagcacctccatcttattattgaattacatgtagcctcagtttcttgagctcaggcttttggatagtccaatccaatccaacttcatgaacagcttgagtgcttgactgacataacacttaagcaatggtttctaaatcattcactctctagaggtcacatcactgattggataatgtttcaagcggcatggggtttttatatgtcatatatagtatgtgcttgtaaatcagtttctactgcttaattgtggctagtcaagttaaaacattcgcttcacattggtaacttgggttcattaatatatcatcttacaagatacacataaaggtagcaattgagaagaaaccttatccttgatttccattctctaattaaggaggctaagtattgaatctcagctcaacttatccgtgcaagtaattgaacccaaagtgcaaagatgcataatgaaaaaaagtcaacacaaggcttaatttccccacctaccatttaaagacaggagatttcaaactcaactacagaggacagatgcttggtctttccacaattgtattgcacacacaagttttgcttgttcagattaattcagttacttgctagtattttataagaactaatctcaaatgccactacttgtgcacaactatcctctcactgacactaatgctgacacatggtaacacttaattaccaatggtaactatgtgagtaggaggtctaaattctaaaaccacaggaatcaaattcgacaagggcagttcatttttcccctctatggcttttcgtagtggcaatttgttgcttaaaacttcactgggaaccatatgttgccgaagcctcatggcaacagaaaaccccccaagttttgatacttttattataagtatataacacccttcaaccttaataagttttatcatccaaaattcccagcttttttctctttattgaaaactgaaaagaaaagcttcctactttgagaaacactaagtttaaaatcacaaagaaacaacttaaactgaccaaaacaaataagccaaaacgcatgcagccatcataatacaactcaacacgagcacatctcatcacacactcaaaattccgaacaaataaatcaaaaaccagaaaccaattatagaagatatatagaataaagcaacagtcatagtttagatttcaaagtcctttttttgggcaacaaaacaataccacaacagaagtaaaacaaaccaaccttcatataagcacttcttgagcatcttttcaaggatccgcaaccatgttggatcatcatcaacaacaagaactcgcaaaccagctggaaaagcatcgtggcgtggagaagagaagcaaccattgtccatgttagttagagagaagagtcctatggatcactgcttgtgagttcaagagaaaaatggggttggcttgattgggttttaattaaaatttaaggtgaagggaatatatgtatatttatatatgtatatattttcatgcactgtgacaaaaagcactaacgaatattaacggtcccagtggcgcatgttatggtcttccaatctttgtgctgaaaagaatagtactatacttggaacaaggaagttgttttgagtaacaaggagtaaagacataaaaaaaaaagcatggtgaggatgagattaaattttatgaaaagatggcaaatttaatgtacaaagatgatgagaattagaagaaaatattggggtggtttttgctttgccatactaatattaaaaataaacaaaaaagttagatgacaagattgttcaattgaaaataaagtatgttttattagcggatatggtttttctgcaaactgtatatataataaggtctattctaattttcaagaagtaagtttataatatttataatagctaacgggttggtttctgtttctttacatatttgttaatgaggttgaagtgggtgatatacggtttaaattgcaagagcaagaacaaaacaagtatcaagccgtattctttatgaaaaaagatgtttggagataggaatttatcagaaaaggggacaagaaatatacataaagagaacatcacctctatgttgtctgcttagtagtatctttgtgaaaaggaaaaataagaagatgaaccgttgtggaaaggcacgtggaatgcattctagagacaagagaatatggttagacaagccaatacattaattggaacccaaactaacatgatcagtttatatttaagtttctttaatataatttatttttatgaacacttgcaaaagtaatttataatttaggaaaggtaatcagaataattttcaaaaaatgtaggagttattttagggttcccccctcataaactaaaatttgaagttgatgaaaataagtcatcatcgaaaaaaataataatagtgtaattgtgcgtttaaatttttttgatctacttttaactgtggtcagttttcaaaattcacagcttaaggtgtaaaagaacaaagtgtaatttgtttcggtaaatatttaatgggattttgaggtctaaaaaaaatatgagtaaaggaagaaccaattttaaacaaagagaagtatttagaattttataaactacaatgaaataaaacttatgaaacataccatgagattataattcagaaggtgattgagcataaataaaaagataagtaatgtttaaataaataaacggctaaatattttcttaagatattataattcataattaacataattatgataaatttaaattcaaatagtatgttattttaagcaaatgcaatcacagaaatgagcaaatgaagcatccgccaaccccatttaattggacaaatattaatgcccttcttagccaatttgcttaccacatgcattcaaattctccatacttgagattcccccccaatatatgttcttctaatagaataatcaattaaaagttacccatttcttttaattaatagtatccaagcaacgaaattaataggagatggaacgagaataaaataattgagtcccctaatatcagtaactcaatgatttcggtccaaaaaccttaaaatatattaagtgggtgcatgaaaaccttttttttagtgtctgatgcccagtaagcccttataattcaaagcaactttatgtacttggaactttattttattgttaaatggtgcaattttatacgacatatatgtcttagcataagcatccaacattttcaggtttagaaacccatggtgttgtcaacgcgtaaatgatgatgagcttcaaaaagaaggcattctgattctaaccaagacaaaacacatcaaaacgcagagggacaaaacatcaatgtcagggcaagacacactaataagtaataacccaagtgaattgtttgtctccgcaccattggtgcgtgttttctccgttttgttgattattagtaacattttcaatctaaccacgtaaatatgacgaaatgaagattatagcacgcagcaaaaggggaaaaattaattaatagtcttaaatcatcacatataagtagttggttcgtccctaaaaaaaaaaaaaatggttcaagtaatatttgatctggtctctttaaattttgaaaagtcttatacataaaaaaaatgtggttaaaatgagaaatcttactaaaaagataattaattctcccatggagtcgagagaaaaaaagaacttcctataattgatagagattatttattaacaaaattagtggatattttgtgtcaatatcatgaatactaaaaaaatttatcactaatttataatcttaactcatttatatgtaatatgtcaatttttttaatttatacaaaataattaatagtngtaaagaataattagaactaaggttgctttttttttttttttaccaaagaactaaggttgctgtaaaaaaaatagaactatgatattctagactctctaacttttttttaactcctatgttgattccaaaccaaccgaagagccaaaccttatacttgatcatttgtaaaattaaaagtaaatgttatggtggaaacttaatcaccacaatgaaaaaaaaaggtgatgaccactaaccaggcaacaactactccttaaatgcaaataataaacatagtttggtaaaaataaaagggttgaagttgaaagtcaccatagagaattactaaatattaatggaggttgcactaaaacaaaccaaaataaaaatcaataggtatctaattatcccattgcattataatcaatagacccattacgtgctccataatgacataagatgatccaatcaacgtaaattaatagacccacaatatatattatatttacatatatattcctactaaaaaattgaaaagggaaaggggaaaaaacgaaagaaatagtgttacaacttacaactgttgcgtaccaacgtagggatggatagatagctctaatcacgttcattgatagaggccacgatccccctatcaatataacatttgaagggctgcgatagctccatttgcaacgcatatgaggcctaaaaggtggcatcttctttaaacctcttttaaacaatggtttatttgaatcaaatgccacttaagttccgtgatcaacagaagcaagagcaaagtgggcacttggtttttttttcctatccctttcttttcccatttattctctttcattttcttagtacaatataaaaagttttaagagaaggggacttgtcacattttaagaccatggcatactatatgccttaaagtttagagtaaataatgtatgtaatgatagtataaaacttcatctaatcataaatgaacataaatttatttacttttataataattattatcttaaaaatcatacaataattttctattgaataataatataaaaaatttacatttcatagaaataaaagtctaaagtttacaaaaataaaaagtccaataaaagctactaaattattttgatcttatgatataagctatctcttactcattcttttctttttgtccggggaaaagtttgttttggaggtttcactttcaggtttggggttaaaggttatacttttgttgagtgggatggagtacggaggggggtttagtgaaaaaggaaaaaggaaaagaagtgtagtaagcaaaaattgaatgaccctaaaaaggaaattcccactaagaaattctttatgataaggagagaattattttatataaagatagggtggtgaggcggcgaatgattggcaactcacaaaacacaaagtggatcaactccatgcaacttcagctaagtggaatagcttttcattagtttaattaatgcaaagttaagaaaatggttttgccttatattccccctctatacataatgcttcttcagttgctctttacctgtatattcttttcttatttgttttggaatttatttacttttcattgtgattttttttcactgttcttacttttaactgggagaatatgctgaataatgcaatgagcgacttcaattgggagaatatgcttgctcccaatcatttgagccacttgctttcacatattttctggtcctattgttatgccatagcagattttgatagttaaatacggagggtggggttgtgtcatgtgtatttaaatgtacttgaatgtattcaacaagaaagaaatgtgtgttttttttttaagggaaaaataagtgtacttgaatgtatgtacttttttttcctctcaaaaaatacatacttgaataatgtagtattggaacactgtgatccaagcacttatcatttgccgctttttctttttctttttcctgtggcaaagtggtgtagcaattcaatggatgccaaagcccaacaacatgcacatggctattattgggccttttgtgacaagagaaggcctgataaaaagaattttcttttgggttcggctctatagtctacttcactattttatttagaagaattttagctcgtaaagacagaaagaggttgttgctttctgcacaaaaaaattgcttccttcacttggaattagttacacttttgacaatcctgattgaccaatccaaaggcaagaaaaaaaaaacattaaaaaagatgcagaaaacaatttttgggtgcaagaagcaacagccaagaaataaaaacagcccaacaatctatccataaactcaatttgtgtaatgctcttatgctcataatacttgagtacttgaaatgtacatagtttgtgcaactaaattttacaactatcaaggtggtaagtacgtaaaccttatctttttgggatagctgtgagttcaaaatttagggggaaaattgttgggagatctcataatttgtacttttgtggagtctcataaatagtttaaaataaacaaaaactttaagaatacctattgtttcacaaacccgaaaaaaaagttaatgcacttgttagtactcttggctttgatggtaacttaataaggctgcagaattttaagaaaaatttttaaatttaataatttttaataattaaataaaaatactacattttttatattcttttaaaataataaaagttgatgtgtttatttaatattttttattaattattgagatgttattaaagcaatatcttataaaaatataataaatgttttatgtctttctgattgttaaaagtttaataactactattttttttttacaataaacatttgggagtccatcatgcattgttggataagatcgatcgagacatgaaagcagattaggtttggtttatcgtttggtaataaggtcgtggttagacatggtgattgtgtagtatataggcttaagcagtgaatttagggattgagaatgaagattgaacaacttatatttgagatataaactatttaattttcatttaaggattcccattcataaatgcgtgaatattaaatataaagaatacatttccttaatttagatagtgcttttgataacgatggatgattttttttttctctcttactcaggatgaaaaaagaagagagaaatttttctttgtcttaatcctctcattcatctaaaacttaattaaaccaaaattcaatcgaaatataagtaaaatttgattataaattattttcgttaaagatcaaatccaaatattatccaacaatacaatattaactagtgataaaaaaatttgaaacatcaaacaaatttttatacgtacttgattaagtttcaaactagtgacaaattgtacatgcattggaggatgtgaactttgtttagctgctaaatatgtgcagttattactacgttcatcaatactttttaaaagttatattattataacaataaaagctccactataccagcttcgctcccagacttgtttctgttatgtatgaaaaaaatattattattttttaaatcttgttatttttgttaaacttttatgaattattattgatgtttcattctttgttactagtgcaagtacaatatgccgccacatatgtaattagatggttcaagagttctcgatcagactgtgctaggagggacactaatggtacaacccattgtttcatctttcagagaaagagcaacaaaaagtgcaacaagagttgaaggcgaaggtggttgttgctcctgagcttgttgagtcccaagtatatctatttttgagtcatggcctgttggggccccttatcaaagagatgtagagaacgtgtttgtgttgagtcccatgggaatcatattacctcgtgttttttttttataaaaaaaagtttaataatcaaattcatcaaaatatgaaaatataagaactttaatcacgcttgaccaaaatataaaaactcaaaatccttttttttcttatttataagtacattatgcactttagcaatacaatgaactgtacacgttaatatgtaacttctcgaaacaataactttttttctttactgaataatactcatgtcattttatttataattaaagtcttaatacaaggaatagcatgatggaaattatactgactagacataaatagagtcatcctaattagtttatggacaacatcattaacttgtctagctcatttcaaaaccaataataacgattgcagaaacaaaaactcttaaaaattataaagaaacatatataaaaaaatactataaacttcaaaatacactgacatatgaataagttttttttattattcaatttttcaacattgttttgatactcacctcgtagatatcatctcttaagttctaactttgtatttttgttttgtctcgtattgcatgccaaaacttgcaatcctaggagtcagacggatgctgccatacgggaaataataaagaacaaactgaagtctgaagggctttcaattccttttctgatgtcaagttgcaattgaaaaacttggaacatgtcaatgtgaaatctgttacttggacaactggactgatgcagcgattcgagatggaccacactcttctagacttggtctgtcttgatgccaaaaggccatgttgggtagttttgaagaggataaatgagggtagtttaaacacacacacacacgctcagaatttgagtgcataaggtgaaaactgtaaatgaatatccaaaatggtaaaagatgaatgctccactacaaattcctaaattgaaagtatgaaaattgagaattttgagtattattgagttgttgggttctcccacctaaccaaatcttcagagttaatatgggttgagttgaacttttttttaccatttacttgtaaccccttgttttattcattcaatggtccaaacataaaaaagcacaagacaacatggcccaaagttacacagttaacacagattttgcggtctgaaaaagcacaaattgaagtaattacgtaatacctcctttttgcatcatttggctttggcctttcttttagcgtagtttaagcccttttcgactcataatatatttgtacctcgttaacattttcttgtatatatcatcaacttataatggtagtttcaaaattcaaattctgtgcaaaatattgttagaaattaataccattaatgtggcgcatggtggcatcaaagatacaacctattaccaacacgacatcgtatgtcttcttgttgtcccgaagccccaagacaaattgttaattgtttttaggagcttcttacaataaaaacaagtgcatgggtcgctttgtagcttgtgcttgttcctttcgtgtaacttctttttagaaaaataatagagaaaaagaaaaggtgaacctaaaatcttcttttgtaggaaaaagaggattccaacatcagaacagataaagacactaacgtgaatgaataatcaaacattcaacaaagtcatcgatccaaaaagttaaagttaattagtgggagaaagctggttatagttgagatgctctcaactcaaaacaaacagttaaattaatcaatcacttaaaattcttgtagcaaaattattattttctcttccttacatccatggatttatcttctttttttcttgttttaatccctctgttgacatcatttgctgtttgccaacttgaaggtgagtttcatatacttttcaattcaatttcagttggaggaaccataaaccatgattgctaaaactttctcttattctttttgaaccatcatgtcatgtaatgatacaaaacacaaactctaaacttcttcacttgcagaatttgttagcattgattgtggagggacaagtaattacactgataccagcacggggttggcatggatctcagattctgggatcatgcaacatggcatttcagtggaagtagaaagtccaaatggaagcatggtgcagtatcaaaagcgaagagactttcccatagacagcaagaagtactgttacacactaagcacagaagagagaagaagatatttggtgagagcaacgtttcagtatggaagcttggacagtggagacacttaccctcagtttcagctctacttggatgcaacaaaatgggctacagtgtcaatatatgatgcctcaaggatatatgttaaggaaatgatcatcagggcaccctcaaattctattgatgtttgcatgtgctgtgctactactggttctccttttatatctacccttgagttgcggcccttgaatctttcaatgtatgccacggattttgaggacaatttcttcttggaagttgctgcaagaataaactttggtgctccaactgaggatgctgtcaggtgtgaaagctcactttttttaatttttaaatttgatgttgcttttggcacataaatgaatgaagagaagactttccaaaattttccttcagagaataagcatcagtagaagtataaaaccttattgccttttcaaggaaaattgcagcatggttagcttgattgagaagaaccactaactaatgtgatgagtgatgacatgaatttggtttaacatttttaagcaaatgtgtttcttaggtacccgtatgacccgtatgatagaatttgggattctgatcttattaaaaggcaaaattatcttgttggagtggcaccaggcacagaaagaattagcacaacaaggaacatagatatagagacaagagaatacccgcctgttaaagttatgcaaactgcagttgttggcacaaaaggagtactcagctacagattgaacctggaagacttccctgccaatgctcgagcttatgcatatttcgcagagattgaagatttgggtcagaacgagagtcgaaaattcaaattaaagcaaccttatatagctgactatagcaatgcagtagttaacattgctgagaatgccaatgggagctacactttatatgaaccaagttacatgaatgtgactctggaatttgttttatcattctcctttgttatgaccccggattctactcgaggacctcttctaaatgcactggaaataagtaaatatgtacagattgcttcaaaaacagacaagcaagacagtaagttctgttagctttttttttttttgtgaaaatagacattttgtttcataatgcataagcattgatgctgagcaagatgaactgatttctaaccatactttcattttgcagcaactgttgtaaatgcatttcgattattgtctgctcaaagttcccagacaaacgaaggcgatccttgtgttccaactccctgggaatgggtgaattgtagtaccaccacgcctccaagaattactaaaatgtaacatcttcaatcacttttgttgacaattttgtttcatagcgagtgaattgtcattctttgaatcactaatctctgacacttttgaatacttaagaatattgaattccaaaatgcatcaaaagagtttgaataatagaatggcaaatgctgtctgttgggaataaaataggctgtggcatgatgaaagtcatgatcaaacatttcaaaaagttcactgaacattttgctatgctaaacatttattggaagttaaagttgaatatttttttactaattgctattgtttgtattagaattctttcgagaaggaatgtgaagggtgaaatcccacctgagcttagcaatatggaagcattgacagagctgtaagtacattgatcttcataatagaagtactcacagtttttctttaatgagatttctcttgtaatttgttctttgttacttaggtggttagatggcaacttgctaactggacagttacctgacatgagcaaacttataaatctaaagattgtgtaagttcttgagtttgacgcatgcccctccttgggttggagcgcaatcaaaacttcagctcatatttcaaatttattagtttttaaccccaaaaattcttctttctatgttttcctttttcttattttcatttcttaattgatgacatgcaggcatttagagaacaacaagttgacaggtcgactaccatcttacatgggtagtttgccaagcttacaggcattgtatgtagcacttaaatgtttctcatctctaatttcagcacttgaagtacttccctagttaacctgacttttcctaattgatattgttatcctcatatgtttattaatcacgcaacatctgtgaatttgtgacaggttcatacagaacaactcatttagcggggaaataccagctggattaatatctaaaaaaatcatttttaagtaagtatgctcagcaacagaacaattttcttacatattgttcatgtatatgcaattgctttaaacgctcactgatttggcttgacaatggaatcagttttaacataatagaacaaggatcttttcaactagtcttgtaccaagattgaagtaacagccatatttaatttctgttccagctttgatggtaatcctgaactatacagaggaaacaagaagcattttaagatggttgtgggaatttcaattggagtactggtgattctattaatattattcttagtaagtttggtactattgcttaatacacggagaaaggcgtctaaaaggaaacgtgaggaaaaaggttagccatccagtttaaatctaatgcttttgtttcaacttgattacaatcaaacttcttcaaccaagcagttttgtccccatcaggcatttctggacgcactaacagtaaacctggatactcatttcttcggggtggaaatttaatggatgaaaatactacttgctatattacactctcggatttgaaagaagctactgacaatttttcaaagaaaattggcaaaggaagctttggatctgtctactatgggaaaatgagagatggaaaagaaatagcagttaaaagtatgaatgaatcatcttgtcacgggaatcagcaatttgttaacgaggtagagttcaattttgtcccttcagcattttcaaatttgaattctgataggcaacaagttctgttgtgaataaattttatcttaggaagtgtatatcaaccaaaaagaaacgattccatgaatttcattagtataacattctccaaaataaaaatgcaaatacctcactgtcacaaccttcttgattccagctcatgcctaactgcagctgcattaaaacatggatttcttagattgctaaacgtaacaacagtaatacatgaaaaatcttaattttcagttatttgattatagagtcaaacatgcaggtggccctcctatccagaattcatcacagaaatttggttcccttgattggatattgtgaagaagaatgtcagcatattctggtttacgagtatatgcacaatggcactttacgggatcacattcatggtctaatggctaacctccaaccccgtatgcatttatttaattaatagaaaagtttatgtcctgacatatatttccaatgttatgacagagagtttcaagaagcagaagttggactggttagctcgtcttcgtattgcagaagatgcagccaaaggttgatcaatgactaccttcacggtccataagtagaattagtatggtctaatgtttgttagttcctataaatatgacaagttttcgttttagtccttcaaaaaaaatgttggtttattttattataaactttaaaagatttgaaaatgacttttatgtcacatatatttcagagtgattgctgatacaacatatctaatctaaatgtatgtcacgttatgacaaaataataataataggccatttatttgatgaagaatagtattaaaactaaaatttgacatatttgaaagaattaaaaacacttaaattgtaaagtgttttacctccaagttaaaacagatgaagaacaaattccaatttctacaggtctggaatacctacacacaggatgcaatcctagtatcattcaccgtgacataaagacaggaaatattctcctagacatcaatatgagagcaaaagtatcagactttggactctccagattagctgaagaagatttaacccatatatctagcattgcacgaggaactgtaggctacttggatcctgagtaagtcatgggtctcatgtgtgtcttttcccttgaatgtgtgaaattcagtttatatttgttctttacaaattacaggtactatgcaagtcagcaattgacagaaaagagtgatgtgtacagttttggagttgttctgctagaactgatttctggaaaaaagcccgtgtcatctgaagattacggtgacgaaatgaacattgttcactgggtatgtttccttttcactaaccacaagatgaaacattggcatcattaaaggatgttaaacaagaactaaacacgaacatgtacaatatcgtacatcaaatgcaattaattctgccaggagcccaggagtatattgcaaaattttaacacacttaagttcaactaaccatatcttaaaaattctgttgtagacttaatggtaaatcagcattaaaatcttactagtttaaaaagcattgttttgcaggcaagatccttaactcgtaaaggagatgcaatgagcatcattgacccttctctagaagggaatgccaaaaccgagtccatttggagaatggttgaaattgccatgcaatgtgtagaacaacatggtgcctccaggccaaggatgcaagaaattattttggctattcaagatgctatcaagattgaaaaaggaacagaaaataagctaaagtcatcatcatcattttcaggtagtagtagctcaaagccacattcttcccggaaaactttactcacaagctttctagaaattgagagccctgacgtgtcaaatggttgtcttccatcagcaagataaataaattggacatgcctttcattccatgtgttgattttgtttctatatttacttctttttaaccattattattctaccaatatgtacttttcaccagtaacagtgtgaccctgactagtgacaacattccaaattttggaaccaattgttatcttcttccagatttttcttttgtttaacatgctaattgtaaattggaatggaaaactaacactactagaaaaacaacattcaacatcgatttttaaccagtattaagaccggcgatgttgaaattttggaagttaacatcggttttcaaaaatcgatgttaacaacaagtatacaacatcgatttttagtaataatcgatgttgctatataagaaataaaaggtaaaaaatgtaaaatctgaaacttcaacatcgatttttgttaaaaatcgatgttaacttatttgacaatattgattttctaaagaaaatcgatgttgatgtgatgtaacaacatcggttttcagagaaaaaccaatgttgttacatgaccacaacatcagttttgtccctatatatgtaacaacatcgattttcattagaatactaatgttgttacatacataaggacatcggttttcaatgaaaatcgatgtcgtagtgtaagttaatatcaattttgactgaaaatcgatgttatagtgtaagttaacatcgattttgacgaaaatcgatgttatttttttaattttttttaatattttgttttttatattacccaaattcatcctacaaatgaaataccagacatccagtcacaatttcagaatacaatacaattaaataaaatttgaataacaaataaaattcaatagtatcaatgtacataaaatgattttctaactaagtgtttatacaattgtttaaaaatcccttaaccacctaacctaatatttcatctctaactttaagataaaatgtagtccactgaaccctaataaccttcaatctctcggcttccagtggtctttcatcaataaaatactgcatgacataataaaacataatttaataagtataaatataaaaagtagaaaaaataaaattagttttgaattagataattatcatatcccagttatccctaaagtttccttggactatcgtcaacatccaatgcatgacataatagtcacactcagtgcttcctttttgcttattacactaaattaaataacatatggtcaaagttaaacaaaaattagagtaaatagtaataaaaattattttgaatacataaaccattatttattaaaagacttactttaagcgcaattcagttagtagtagcttttgatttatttcctcgagagtcatagactcccttcaaagcatgcttaagagaaacatacatgcatattgtacaattaacacattcatgtgttagaaataataacagaaatgtcttacaaattacaacctgcctgttattaggcttgttatgcaacgaacgaaaccacacgacaacattaaccctaggacatataacgaccaattactaatgtgcattgcattggagagaaaaaagtcattatactgtatacattatgcatccatttcttaatatagtcctcgcattcaagtatcctatttttgtagtaatgtagatttatatgaaatatcatacctttaatatatatatattacatttattaaatataatgttattaagtttaattatatattatctttattaattactttaattaatactatattagacatatttttatttgtttatttatgtaagtactgcactaataaaatcaaatacggcattaaaactttttatatctaatttactatataaacatcactatagatagattaattatagctagactaattatctttattatccagaatcttcagattttatcgtattttgatgaattgtgcatctatgctcacctaatcataataaaaacataagatgaataataatgtaaaaaataattgccagattgtctaaaatattcaactatatgcttcaaaggtgataacatattgttttctattgaggagccacacatatgtgaatcccataaggaaatcagaataagatacatgatttaaaaagctataaaaacaagaatacattttttcttcaacttcaacccgtttacaaaacctcgttgaactccataatattttttaacgaaattatattgtactttaaatcgacacctaatgtgttacgtgtgcaatatcttaattagtgatagtttgactgtcattatgcattccctctctcattacaatttttttataaaaaaaaatctgattcaattggtggaagggggagcagagagaactgctgattattatgaagaaatttcttactataaattaaataatgaatgagtagggtgtgttttggtataataaaaaataacaattaaaaatttattaaaattaatgtaaggaatctatgataagacaataatctaaatcaaactctatgaaggtaaacgtctaagcttggcaacttgaaacaagaaatcctacaaataccctttccttttttataatacctactcaccacacgatcagatatgctgaggagagagaaagcgatagccagcaaaatattttttaagtaaaaaataaaaataaataaataaaatatttttttttaaaaaaaacttggtgaataaataacttctaaattattcagaaaaaaaacccttcttaattggtccttgtaaagttgtaagatggagatattttgattttctattctcattatacattttttttatttcattgtgacccttatgttaggttttgtgacttttgagtttgtcatgttaaaaacatgggaaattttttttaaccactgtatcaatttatcttaaaatcaatagttaatattcttttaaatttttcttttcttttttctttctttttccaatttttgtctctcttatatttttttcttttcttttctctttgaacattgttgttagcgtcattaccaccatcaaccatcaatactagaattataacaaatgcaaaactataaaggggaaggagacggtctacgacaatgtatttatgtttagctttggtgatggagtttgttgtgggatttgcctttggttttgcaattggccacgatgggttttgtggtggatttattgtgattcatagtagattttgcgatggttaagagaatctgattttaaggatggtaaagtagatcagtccatccaaacaggattggacttatccacttttggaaaataggctagaaatactagctcgtttcactttaaggtggaccagcgggctagtccacataaaaaaataaaaataataattaaaaaaaccaaaaaattattaaaaaaatacaaatgtaattaatttatgctagattaatacattaagttaaatttagcaaagcaagtagcaacattcatacattaaatttaaaatttgctaaaaacaagttagaaacattacaacttccaaaatgcaaaataattaaattgaagaagtagttgcatctaatcatcttgagtagttattgtatttgatcccttggaaacagttggattcatatttaaagcacaaaagtcatcctcatcatcttcatctataaatcataatcaaaaaataaaaatagctaatgaataataatgatttaaaataaaattaattggcaatttaaattgtaaaataatgaaattaaaaaaactatcattttcagcaaaaccatgcaatcaaggcttcgacattttctgacaagagacgatttctatacttgtttataacatgtgatccaatgttaaaagtagattcagaagtcaatgtaataataaaaatgttcaacacatcactagccattatggataattatggaaagtgattataattatccctccaccattgcaacacatccaactcttcatagtgcacaaaatccaagtttggctcattcagataaataataagttgtgaccttccaactttagaagcaagttgactactatgcattttcaatttctattatatatgacaagttgaacacaaaaaaattaaataaaatcaacgaagtagacaacacgaaaaagtaaatattatataataacataataataataattcataagcatgtatttataccaaacattctttgatttattcccttgagttcctttgacatggttgaagaactagtatgggttcttatgtcaagattgtgaataaagacagcgttattaatgtttcttgggtttgaatacctctcaaagaccatgtataactttgttcacacatgttgaatcttttcctcacttgtagattcatcagttgttaagtaacaataactcaatgaagtaaacttaatatgtgggtcaagaactgctccaaatgcaagaatgatgctataatgatcccagtatttcttaaacttcatcatcatcatttcccccatactccttataacctcatcttgactttgtaaactcttagtaagaacatgctgaattttccaaaacttgcaagaaatataggttggaagtaggatatgaagtgtctgaaatcaattttgtagactgattttgctcctgtttgcaaggatcctccgtattgtctccatcattgcatttgttcaattgcaattcaacacgccacaagaagacaaaattgtgcgtgagatctaagcaacaataggagttgttcatatttgggtttgaaatgtggataagtagtgtaatttggactgaatatctaatttggtttggaaaatggatttgcatatccgaagaagaaaggaaaaaaggaagagagaaagcaagaaagaggctaggaagaagatgaaggccaagtgaggagtaaaaaaaaaaagattctcaaaataaaaagtacaaataatgtgtaaaatattgctagtgtttaaacgagagggtgagaagaatgagacaacaacagtctcattttataattgatgtatgttttttttatttataatataaaaatatatcaattatatgattttgtcattgtgtaatgaatttttttatttaactatagattttgttatataaaaatatagggtatcttgttaaataacttaaggtcacgctgaaggtggctgttccttttcgattttctgttttaaaatgtaattttgaaacagaatcgtgtccgacaaatatgaggctgaattagttttctacatcttttcaaaacagattttatcccatatgaccccatttgagaaacatagcaaaatttgatttaatggttattgtttttgtttatacaacctcacacttcttccttcacgccccttcacctccatcgccctttgtcgtctcgccgtatcctgactccggttagctaccagaggcggaggcggcggagtcggaccttaggccgccaccagcagcgacgacgtcattggtaattacaacttcgcttgcatcctcgctgcccaccaccattgcaccaccaccagcctccccttcacatacccaaacagcagtgaagtaggtggcgatcatgaagttgcagaggaaggtgtcgcgggtgcgggtgaggtcgaagatgcggcgcgcgtggccttagcactgtacggaatcgaaatcgcactgttccgcacccgcaactcccactctccctttatcttcttcaaacccattccattcccgccgccgcagaaaccctaccctccgtcgaccacccctagctggaatgggtctccttcgtcgaccacttgaacaccaaaggctacctttccaccacttttagttattttctatttcgcaaccggatttcaaaatcaaaggttttcaaactaaaccgaatttgattttcaaatgtcttaaaactgaaaacagaataccattattatctttcttcttcttaaaaaaaaaaaaaaacttaattatctttattttttggaacatcaataattttttaattaatttgctgtaaaaaacaaacacaacatatactctctttatttagattttttttagataaacacaacaaatactcttggtaaatattttaacttttattctcttaatcaactgcttatagcaatttccctgagtacctaatcactgctaaggtaggacgaatcgtctcattaaaagtttacatgcctagtatttttctttctttctcaaacaatatataataagactttggacaatttttttgcctccaacaaaaaatacacacaaaatttacgtatatactaatatctatccatatagatacagtacaggacccttttgattcctttccctctacaaagagacaaaacctgaattaattaacaagaaaacagtgtttgcgtgagccagcacagtagtaaatatgatcacactcgtgttgtctcatgactcatgactcatctcggtctcattacatctatgactcagcattccacataacactatcatagatacaccagttttagggtgggaaagttacgcatatttttcatcatggaaaagtttttttttaagcccttggattttttatactttaatctaatggttacgtatttttcatgattttctttttttcttcctctttccttattcccttctttcttctcttagaggctgcagaccatgacgccgttgctaaactcgattttccggcgacacctgagttcctcttacatctgttgttcctccttcgcggttgagtctgtcattgttataaatttcgtagggacaagggagggctattttgggaaaaaaggagttaaaaaacaaaaagaaaaaacaaataataaaaagaatctgaaccattaatttagaagcagaaagatctaatggtccaataaaacttccccatagtggaaacatgttttaagttttccaccctagaactggtctcatagaaaacaacgaaacgcaacatcgtaatacggcattccgcttccgttcattgtttcttccttccctcgactcaactctctctcacccaccacaaaactacgaaaacaaactaacaaggaaaaaccttctttttttttttttctcttttttgttccctcatcctcatctattggattaactgattaatattatttggcccccttctaaaaagaagattcttcatccttccacacacacaccccacaactactgggagagaaaaaaggaaggaagttttgttcttttctgagacccttttgattttttatattttttctgctctgaagaagaaagatggaaatgatggcataccatttttcccggctaccttactcggattccctcaaactgctagaggccgatatacagcatgcaaatgctttgttagtttcatttctctctctctctcttcatcttaacaacttatccatcactttcgctcttcttatgtatagtttttttttatgaaaattgaaaaaaaaaaggaaaaaaggtttttttttttttttttgtagagaatgggttttgacttgattaaaggctctaggacttgaaatggggtgtcataatcacttgataagcatctgcctgttactgattgagattgatcatctttaattgctttctagtggttgataaagtgggaaacttttgtgctttttagttgaatttgtgctcagactggaatttggtggtaaatttgattgtgaaattctttgtttgggactatgaaatataatgtgtatgtttttttttctttttctttttttgtgttgtgcatcctctgaatttgaatactgggtgtgtgctctctagggctgctgcaattcccagagccaagggtgggactcttctccaaatgaaattggtgtacaaccacttggctcctctctttctgttgttgctacagtggatggagtgttcttgtacatgctttctacacagatatcttgacctcttccacatagttgtatataaggtaaatccctagatggatagaaatttctagtttgtgatacataaaaagttatattttggtctctggtgctaacactagactagcatttctagcactataaaactttctgatggtgataaactgcaactaaaatttacaactttcttgtgtagagactacaatttaaaatgaggacaattatagggaccaagtgaaaagtttaacaaaccttcttgtgataagcttttgattcaacaattttggttttgacccttgtttttctcattattgttgttgttggtccccttttttttttaccaaaggtacacaatgatggtagatcaaatatgacttctcatggaaggaaagcaagcatccgggacttttatggtgcgtgaatctttgactctcaaaaagcaacttttattttagttattccaccctaaaaaataaagtgctatatttgtggctgcctttatttattattcctcactgttttttggggttaaatattgtactttagccgttatccttccatctctcgagcggcttcatggtagcttggagaagttgaacatttgtaagaaaggtcattctagaacagatggctcaagttatggcaagaaaatgattgaaggtgatgagaaactaatcaatatcgatttggaaagagaagatgaatgtgggatatgcttagagccttgcaccaaaatggttttgcctaattgctgtcatgccatgtgtatcaaatgctaccacaagtggtatgtattcatattaaacatgcacatttagtcgtctaactgcatgttcaaattgttctatcattattttttttgtgtgtacaatggttgcactaggttcgagccttagatcttatgcaaactacccaaactctccaccactagccgaccctagtgattctagtttatcatcatttgtaacacccttatgctgaatctttccaacctgcaggaatacacggtcagaatcgtgccctttttgccgtggtagcttaaggagagttaattctgaggatctatgggtactcacttgtaatgaagatgttgttgatgctgaaacagtttccaaagaggacttgttgcgtttctacctttatatcaacagcttacctaaagatcaccctgatgcacttttcttaatgtattatgaatacctgatttgatgttatttttactaaatgagagaaaaattgtacagatagggaaatccggactgcaattgtgaatagtctggtaagaaatatttctgatttgtaaggcacagctctgctaagataaatttctgttattctagcccagaataaccccactcttgccttgttatatatcgattactattactattccaatttactttgaactagttgtttgagtcacggtaacaaaatttttcttcagattcaatgatctctaactaaagctttctaactagctaattcagatttaatccactagcctattagacatgagtgtttttacttagttgaaaaagaatgatgttgactatgtggatcaatgggaaacatttgttatttttagactaaaaggtgcatatcaatatatcttgttaaggttaatgataatcaaatttttagttaacaaggtgtacatatttgattgacagattaatagcttgtattcttctcatataatgtgttgttagtttgttacatgcaacatttggtgtgtaagtaacattttttgaaatgctagaagtatgcatattataagacaaatgacgaatatgcataatcgcttaactatatgtaatttatatgatgatatgaatttacaggagtaggtatgaatggatagattttgaaaatattacctgttatgtgtatatgttttaaaatatgataagtagtgttttaaaatatgactttaaaattgtaatttttattataaaaatattgcaatcatgactcaaaatacgactttaaatattttatatttaaaaaaatattaaaatttgtgttttgaatcatgatttcaacttcatgttttataaatttgtctagcattcccacttaaatttagctaaagttcaaggataaaattaattaagtagnnnnnnnnnnctgctaagataaatttctgttattctagcccagaataaccccactcttgccttgttatatatcgattactattactattccaatttactttgaactagttgtttgagtcacggtaacaaaatttttcttcagattcaatgatctctaactaaagctttctaactagctaattcagatttaatccactagcctattagacatgagtgtttttacttagttgaaaaagaatgatgttgactatgtggatcaatgggaaacatttgttatttttagactaaaaggtgcatatcaatatatcttgttaaggttaatgataatcaaatttttagttaacaaggtgtacatatttgattgacagattaatagcttgtattcttctcatataatgtgttgttagtttgttacatgcaacatttggtgtgtaagtaacattttttgaaatgctagaagtatgcatattataagacaaatgacgaatatgcataatcgcttaactatatgtaatttatatgatgatatgaatttacaggagtaggtatgaatggatagattttgaaaatattacctgttatgtgtatatgttttaaaatatgataagtagtgttttaaaatatgactttaaaattgtaatttttattataaaaatattgcaatcatgactcaaaatacgactttaaatattttatatttaaaaaaatattaaaatttgtgttttgaatcatgatttcaacttcatgttttataaatttgtctagcattcccacttaaatttagctaaagttcaaggataaaattaattaagtagactgattcatgagttttttctttttcaatatgtaaaatttgtataccatcacaggctgtgtcctagtttggcttcttttggaaagtataacattgacaatgattctagacttgcatttgttcaaacacatttctattttttacaacctctttcacctacccatttttttaaggatacaaatcatctaccatttttatccctttcacttaacccttattaattattttcacgcaaggacaaaaaactacgtctattttaacgagtgatgttaacttttataggaacttgctccctaattttatggcttcaacgtaagctatttctctttagagaataataatatatagatacgattatacatcaaatatcttattaatatatattattttattttaactctccttattatattatattattacttattataccactaatgcaagttgagtctagtaaatgaaattaatctcttgtaatagagaaattattaggtgatcttaaacaatcataattcctattaatttttatataacatttaatcaagtattgttaattttttattgaaaaaattgtaaaatctaaatgtattatataaacatcgattgagacaatgaccattgatcaagtggtggttcgagaataatttttcatcacaatataacaaattaaagttttaataaggtgtccatatttaatctttgaagcgagatacactaggggggaaaacataatactcttgctcccaatttcaagaatcgatacactaatggaattgataatcgatccataatttgaccaagaaattgatatttgttttttatgcattccaaagaaaaacaaacaccaactacaacgttcgaaactactcccacgaaattagcaaggagattgcttcttcttttttgtttttaggttgcttcttaattttaaatagttgacattgcactccatcgaatattaatcattggattcaattttaaattatctgatgacaagttgtaacaaatttaattgtactcataactgtttagaatttgcaaagaagtcaaacacctgtagattcaaaaaaaaaagtcaaacacaagctgattttacaaagcaatcttgacgtttaaaagcaggttttatgaagcaaacctgagtacgctaaaaaaaaacttaatttcttcacctcaccactatctcagtcctgtgactatgcgcaattgcataaataaaacgtttgattaagaaagataagcgataataaaatccattgannnnnnnnnnnnnnnnnnnnnnnnnnnnncaaaaaaaaaaaaaaaaaaaagagggaaatataattgacatgtgttcgcacttcacgcacgcccaaaacaattgcaatgtgcttcccttttcttcttccaagcttttacccccagttgagagttttgatccctgaaatgcggaaaatgatgattggggttttggtacaatttgcttgattatgctaaggtagtggaaaaccaaatgatgattggggttttcggtataaattttgtggcactgccttttacaaatgaatgaacctctacgcagaatcggaaatagctacccagagttcaattacttgtagtccagattaactagttaaaccaataatttaaactcagcagcatggatatcaacataaggtaccgacttgaatgaaggtctcaaatctagtcacttgtgatgccaaaaatatattttacttacaggatttattttaacttgcagatcaatttgcaaaatacatgaaaattgaataatatgtgtaattggaaattttaatatcaaattcatttacagttgttaataaaattctttttcacgcaattatcaccatttttgggttgaaaatcagttatattttatagttttcattaaatgaatctaataggataaattataaaatgatgactatttcaaaaggagcaacttgacccataaaaaataaaagatcaaaataattttttataatatgaaggatgaaaataaatcttaaaaataaaataaatcctagttttttttatatataaaaatttatcctcgttttagggactcattttccgtccctcttttttttttttttttaagtattaaattttaaaaaggtaaagacaacctccaaacctgaactcatacctaaaaaaatgaaatactgggaacgtgttgtgtgttcccagatcaaaatcttgttttggttcaaaatgggcaaacaataactttacattattatctcaatccctatctctctctctctctctctgctttgctctaaggtattttctcttgttcattttcagggctatgtttggccaagggtaatacatcggatctacatccgttgtttgccccttgttttcaattcactctgaacgtgtaaagttttaaactttattagataatcatgcatttgggtattggagtggatttgtttttttatgtttttgtatgggaaagccattttctcggatgggcttattgtctgagatagtttgcggcatgcttttacatatattgtgtatgtgttagataagatactgcaatcccagattttgttgagagtgtacaacttcagtgcttagaaacttcctcagttgttcattttttttcaggcagtaacttccaatgagtggcggatgtatttgttgattgtaattggtagatgcatttgaggtgcattttgtgaggtcatgtgaaagatggatcttgaaggcaaaaaatttgggaggggtaagaacttgacatgtagattattgattgtttgcttctctttttttattgctgatgcaaatgtgctactagataactatatgttcttagaagtggactttgtgattactgaatagttgaacaggaaacactgtgaaaacatatgcaatataataattcacagaatgcaaattagatttcttttgagtggactgttaaaaacaaaagattggtagttatcagagctttctttaccacagaaattgtttacagtagaactttcttgatgtcttggttcactgtttattggagccacacgaacagagaatttcgtgaggtttaaagtcagtgatatagcaaatggagcttactggacctaatgatcatgagatggtcatttataaaaatcctgttgagggctcgctctaacatttaaaagtgctaattccccacctttcttttggcattagttcattgatgactagataacattgtgttcgggctctatcatgtatgttaatttattatttactatcctcagtggattatttgataaactagtgcccaatgccaatattcatttttcttattactacgtgcatgtggccatatttgtaaaagcaagtatgagtgaactgattgttctttcttttctactaaaaacttaagaaatgttcaattgattgttatgattaaatcttgaatgtcaattcccagttctcccattatcttttaaaattaaagaaaaactgttagtgcaggtatttccatgtcttatgtttgggatgtaattatcttcaggcaaataactctctgttaatgttgatacagaggttaagattactaattcattattacgccattagacatattttgtctgttgttaatattttttttttctttcttgagggggagctaaatcatgtatggaaacaggccatcttagaaacagaattagataattaggtaaatatccatagatatgtgtttttatgctgaatcttttgacttgcagatctattttaacttgtttcctagagagtgttctgtctctagtgctctcatattgtgtttttagatagaaaaataaatatgctctcctagatggctagaattggaatgatttgaatttcattatgaacttatgtttgttaatttataataaaattgtattatgacttatgttgagttgtgttatagacttatgaactatgttgagttgtgtgttatgttatgtattgtattgtatttggatcttatgattatggtttttcaacttaagcttgtttaatgttgtgttttagaggttattttctttatctatgttgtttttatgtgtgtgtgtgtgtgtgtatgtgtaattttgcattttaggtattgtcttatgatcctctacttaaaagttttcaccccccttatgatcctatagaatctcatgtttaacaacattgtgtaattgtaactgaaacccttcttggcatggctctcactttctgcagtgatttacctatttaccaaggtgaaaagcttttcctctctcaatccctttgagagtattgggcctctggggatgctcaattagagtattttgatcagatttattttttaaaataatcacatgcaatatcactatattatctgtcattaggtgcttctgattaatatctgtcagaacattgatttaaatggctcctcagtttcttttctttctttttgaaaacttgcaatcaatgcatcaaattcatttttcttaaagtatattttgcttagtaaggttatttcttggaatcaggcaatagagaacttggaggtactcgtgatctcataaatcagtatagactttggccctactatgaattcttctgcaagaagtcactcccagtgtcaatttcagagacacattatcttcacaatgtggtgggtgacacaaaaatcaggaagggagaaggaatggaactggatcagctctgtaaaaacatggacacgagtgagaaaaaaacttgcttatgtccttttgacttggatgtactaagtgaagctttccatatgagggatatgaatccagtccacctttcttctgtaagatttttctggctgcacatttgatcctattcttaaagaaaaccgaatagttcaaattcacatttgattgttgtgttaaaaagatgtgttgtgctgatgtgttatacactggccagaaggggctaccaaatgcagtgcccaaattagagaaccagtctagagatcatgagaggaagaacaaaaaggtcaaagataaaggtgagaaatataggaagcagaagcatagattacatcaagtaaataatggaagttgtatagagaacatcagaattagaccccatgatcctcatcccttgcagttgaagaaccaacaagacaaggtttgctcagtcctttatcccactcttctgtgtggtgtgttacgttaaattaaatgcaaaatttattatttacataaaatttgctgcctgtaaaataccaaatactagaagtgtggtattctataattttattgaccttgttttcgtaccatagctagtatatttcatattctgttttgaaagaggaatcggcatcagttattagcattaaccatattaagctaatacatgattttggtttgactaaaatattaacaagtcttgctattcatacaacaatttttttatccatctctctccattgcatcatttattacatctcgcatttctctctttctatcttagtcgtataattggctgtacaaataacatttctttattaacatattgttgaggttaccattttttattgtttaatttgtcaagttgtcaatttttaattatcgagatctgattatgagttattaaaccgtaatatgcaatattgttttgttcctttatgttttaaagtagtaaatgatatttatttgtgacttaaattgcactaaaacccaattttatctctatttaagtctttcagaaaaggagggcagagacaagcaacaatgacccttctgtttgcaagcgataagatactagaatgagagcaaatttgaattttttttttcgggaaatacgtgatctaattcagaaactgacagtgaactctgctttgtcacatttaacattttctgttatcttctactctaaatctcgttacatgtcttgattttttctatttggctcgcctaaatactgaatttctatagtggatggggtcagccaagggtgaggattaaatgaaccatggaaagtcaattttaagtgtatagtgcgggaacaaaagcatatcatgttctgcagtttgtttattaattaaattaaagcattatcattttctttctttctttctttttttaagttttgcctttttgttttatcactagtttttcctaggatttcaattgtatttttttattaaaacaattgatggtgttaatgtttttaaattggactgatcattaaattgagaaaagtattattccatgatttgtttgaccatctttggtagtagtaattatgtgtacattttattatatttaataccatatattataaactcaaaaaaattagaaaaaatgacttaccccaccgtcaatcaagaatttttacactgattaataacttctcattattgctaaattgagagttcttataagatatatcatatttatataatttttcactgattgaaaattatttttaatactttcttttatgtgtatgtaaatttttaaaagatttgaagcataattatagtaaggtattactggttctagtctttatataaaaaataaataaataatttaagaccaataaaactaggtaagttagtttaattaataaaatcaaatttaaatcttattccaaaaatattaataatggtaatatttaacgatattacacataatttaagggatgatattttttcaccaatgaatgtatttgtattgttaataggtcaataaatatattcacttgcataaagaatgaatgagaatctttcaaaataaattaaagatataaaaaattaacaaataatataattggatctatgttcttataagnnnnnnnnnnnnnnnnnnnnnnnnnnnnnnnnnnnnnnnnnnnnnnnnnnnnnnnnnnnnnnnnnnnnnnnnnnnnnnnnnnnnnnnnnnnnnnnnnnnnnnnnnnnnnnnnnnnnnnnnnnnnnnnnnnnnnnnnnnnnnnnnnnnnnnnnnnnnnnnnnnnnnnnnnnnnnnnnnnnnnnnnnnnnnnnnnnnnnnnnnnnnnnnnnnnnnnnnnnnnnnnnnnnnnnnnnnnnnnnnnnnnnnnnnnnnnnnnnnnnnnnnnnnnnnnnnnnnnnnnnnnnnnnnnnnnnnnnnnnnnnnnnnnnnnnncaatttgtgacattggttaattcaattggtatttttttaatttgtaataataataatttattaactttactaaacctcttaaaagagagcacaagacgtgcgtttttaatatatattttagtctattcatttcttccaagacttcatatttctatttttataataaaatagttatttatttacggaaaaaaacaatttgtttaatggaaaaaaatgatttgctaaatggagatatgaacaacacaaaatgtaagttccttctcattattaagctgaaaaatcatttaaatttagtttatttttcctttctctgataatctgattatatatctttttnnnnnnnnnnnnnnnnnnnnnnnnnnnnnnnnnnnnnnnnnnnnnnnagaatgacaaaatcatgtgtgtgattgagttattttttcctgggaatatatattataattaataaattatctttattacaaaagttatcgttacataccaggcccatgtatttgacgattacaaaaattaaaagaagagcaagaattgcctattaaaaaaagtgcgttggaggtaaaggaaaaactattgcaaaatataggaacttgatagtaaatcaaattgtgggaatattgattgggcaagaatgaaatttgcgggatttttttttaaaaaattaagcacctatcatgaaggaacaatgagaaagtagttagatagtaattaataagagattatatatgaatttttactcatgaagaggtataccaatttcatgggaataatttttgctcccctcatgctgagactaaatattgatagaatatgagattatgtcttttcccaaaataaaatgttttataacctcgtaataaacatgggataatttttttccgatcattttttttagaattactacttagaaacaattcctatattatgtaagagaaatttataatgttaacttttaaaccatacaacatagacttaaacttttatttgttatatgctttaaactgtgatttactatacacaccagacgttaagtgtatattataagtctggtgtgtatagtgaatcacggtttaaagcatataacaaataaaaatttaagcaatgaaagtcatcttgtgttgcattacaaccactaatcagttggtaaaaggatttcagacaagacttaaaggactgcataagttaggttaatcaaacaagtataatctagatgcattcatctctaactcttaatgtcttacttttgcttataattgagttatatgcttctgcggttgtttgtttgaaatgttgcatttaaaaaaaaataaaaaattaaagactcaatacaaccccgcggtcttgagtccttgtgaaaatcaacttatacattttagtttttagagaagttaaataagcgttttaaaaaagtgcataccttaattttaatttgtaaaaaaagttgagttagtttacttttaaattttattctcctataaaggttgatagagaagttaatccaaacaataataacaagcttcgccaaaaaataaatgataactaacaatttacgtaaagtacaattcattattctaataaaggtttcagcaattgaaatccaaaataatcatttcaattttttccaccataggtcaaataagagattatcacctgtcattacatttctaatctactaaaatgttttttttttttttttnnnnnnnnnnnnnnnnnnnnnnnnnnnnnnnnnnnnnnnnnnnnnattcgtaataattaaaaaaattgaacgtataaattatatttggaactttaaagtggctataaaactacttttggtccatggagtcacaagttctgataaatctgttgtttaaaaagattggctcatagcctaacaacgaaacaccttggaaaaataaaacattaaaacaagttggggcattgagggtcatcataaaggaatctaacttctgctctaggtgatgctcgatccatctgcaacaaatcacattaaatacttaacaatacagatacatctaattgatttagaccatgaccaaccgtccaaccctgaaagtaagaatcttcaatgccggtgatcttgcaagcacaaaccgtatcaaatcaagtgcagtcttataggaagttttaactgtgattttcacatcttgaagctgattaaagtaacagttactgtagtcaaacaccttcgaaatctggtgtagctccactgccatgcaattgcactatgaaacaaagagaaagctaaatcaaaatatgacaattacaagaacaaactaagaagcataggtcttcttggtcacctttataataagtgtctctaggttagaagaacttccaagtaataaagaaatagtaaacaaaagttctcttgcttcattgaaatctacaccatccaatttcagatattttatagctttaagctgcacttgcggattatctgcctgcagacaaaatctatgcaaagaaaacaatgcaaaggtgagatatatttgaacacatccatctcaaaatacaagttcttagtataagacaaggcaccaaattaagaatgctggttcatgaaccaaaatgcaaccttgtttctcttcctgaacaacaaataaatgaataggataattttagaaaataaacaagggcaaccaagctaggaggtagaagaaatgtgacaactgtcaatttgtgatgagaatataaagcactcaatgcatgatgcatcattcattaacataatttatgatcgtcaaatgtttaaacgatatttagaggaatttgtgtagattttaaaaattgagtgaaagtgtatataattttcttagactgcaaagaaagtttatataggttttaaaaataaatgacaaatatgtaatatccttaaattttggaaaggtttgtgtaatttattctaaatattactatatgtgtttctacatgtgtgactatgaatttatttatcttaacattttattattatttaaaatgtaattactgcaaaatttaatatctctatatgttatatacatccattgccaacaactcgatattaacttataagaaaagaaataagattaaaaaaaatgagcttatctcgtgagttaaaattaatgcatatataagttaaaattagctttagaattagttaaataagagaaatgttaaaaaataatttatgtataaattaacgtcagcttataaaaaaaattgatttccaaagaagtaattaagtcaaagcggaaagtacaaataagtggtattcaaaagaatacataagcattatttaaaattaaatcctaatacacatgtaaagaacagtgctaactaaactcggtaagattgagcttttaagatatcatggtcttaggtacaatttctactactatactttcattgccataagccctaaaataaagataccttagccatgaaataaggtactctccctttccctcccctaaactttactaataaaaaatgtatattgcagttgtcaatttgtttggaatgactgtaagagcaatcaaactgttcaattgcaccaccatctaagtgaatgatcctagagatcctaggagggacactagatatgaagcaaggaaatacccacaaaatttaaccctcagacacaagtaccaaatggaagtagtctaaaactactgtgttttcatcctttccccctccccccagcccaaccacatagtagtgtatgatgcttcatctgatcatcatctcagttctttttttcccctctcttttggaaacattggtacaaaattctatttcttgtaaattgaattgtagcaccttttgttgtcattgtagttttctccagatattacctaggtggactaagatcagcacaagggcataaagaatacagagatacagtgacatgtcaaagaagcaaaattgttcgtgtggtcatctgaagttgcaacaacgagctcggcctctagacaatttgtcccaaagacagatcatctgccttggtgattggtaatgtgcagtgaagtagccctccatgcatccatactgacaaaacttccaattatgggagtactggactgctgccatggtattgttatatcgctcaacccacattcccatacttacatcctccattttaaacagctgccaaataatatacttcagtcacctataattttaattgatgtggcaacttggaaagggaaggggaggattgcaaaaggtaaaatacagataaaaatttaaaaggttaaccaacccttagtttcctatccttgtgttgagataggatgaaagtaacaatatcactagaaattacatatgcaggcccatttgcataaggaggatatacttcttctggccattcctgcaacaacaatgcacaacacctcagagaatggaacaagaacaatttacaacattctatgcattctccgtacttgccaacaaatatattttaaacaaccacaataaccaaggaaaagaatccaattacagaacagaaatataattatgaaacactgctgcatcctactacaaagtgtcaatcaaaactagcaatgtgttgcaccagtgcactggcacgttccagtaatatataaaacaactaaaatcatatttgcactcctatgcttactaactagaagtaattgtattgctaaatcttgagattttagcccaccctttaggaccctatttggacaaataaacatcacccacacaagtggtcatggcagcaaagcagttggtctagggtttctattctcccatgtttttaagaccctatgtaaggcaaaacaaactacactaacatgtgttgggggtgtaataggatataaagagaattataaccctaatatctacatactatatttaagctccaaggagagctgccaattgattgttaaaattaacaaacaaaagaaataaatgatacaaaattcatgtagtaactatcatacctcacaagtgactgcccatttgccatttctcagaggccgatgccgaagattgagattgcccatataaagggacttttcctggggtaccttctcaatttccttcaagacagtatcaacccttataaatgtatcatcatcacatttcataacatatgcagcagtcacattctgaatctgcataaatgaacgttaacttctttactctagagaacacaaaaaaaaaatataattaaaggaatcgggggtggcggggacagttttaagtggctgaaagaattgaactcaccccaaactcactaatggctacagttttaagcacaacaagctcatagcggtccataaagggcaaaatgacaatatcaccaaagtaagcagcctccttcttcaacactgcatttacttccgttcttggattctttaattggcacaaaaacagaaaatttagccatataatatcactacaaggaagacatgaaacaaaaatacacacaatgccatctaagaattccaaacaaacccaaaagggccaaaactaaaattttcatttgtacacttagattgcaattgcattctatttcaaacagacatttcaacatggaaatcaaacatcttaacgtatatttctgattctatcactaagcccaaagtggaaaatcagtgttggcaaccaaacctgtaggattacaaattgaggaagtattatgcacaagcagtcaaggtaggttcccttatatcaacttgtcatgaaccaagtaccccaaaagctcaagctatagggtgaaagcaaagcacaaacaatttttttattaaacacatccctcatgcaagatctgtatgggctttaagcatggactatggataaacctagccaactgtgtgctaaaatttagcttttattaagaataagggaggcaataagggttgaactctgaaccacatgatcataaaggctcttataccatgtcatgaaccaaatatcaaaaaatcataagtttttaggagagtgaaaaagcaaatgaatggtttgtatatcaaacacaactgatgtaatgatttatggtttaacctaaaacgtcaatcttgtcccatgcatttgtaattgatttacagcaacaacattatgtgatgagattgtaagaataaaagttgcacttgtagtcatcttattcaaagaagctagcttcatggaacccaaaatagcttagtcaaggtgatagctattcctaaaagtctgttatcactcacataacatgcttaagtcacataacaaagtcaatgggttacattgccaatgacggatcacatttttgcaagacaaattttggtcctaaagtattttttccttttgctttctaaaataaatttcagtagtacatatcatgttaggctttattagacccaaaaatattttatcaattgctataaaatataagtcataccttccaatacccaaatgtcaaattatagtaccaaactccaaacaaagaagcataattaacatgcttggttagttggttatgtgaaaaactcataataagagctcaagttttcttctgatttgtttattttatttgaaagaccacacccttacgcaacaaatgaatttgatacaagctctttgaaaccccacacccagattctatttgcaataccttcataaccaacagattaagagactcaaaagctcccctttgaagctcaaaccagagattctatcattgcccccatcattatttaaacccattttaccatgaaataaccctaggaaggttgtctttctcttctctatgaagttttttctgtgtcagtgtgtcatatgtctttcttggaatcatgcgtctctttgtgctcatgtctgagtgaatcacttatatacttttatgccagataaaaataaagacagaaaacttactagtgcaacaaagaaccgtgctattacatctgaagacttgattgcagctgattgcatccatgtctttctaacagccatacgttctgcaaagtgatttgaagctgaaagaactccaataaaaagtttaataggatgtttaggtaaaggtctggctttccaggtctctgacatttccagtactctttgaggtgagaaacttggatgggaagtaggaagagaagtagcataaattgaatgaacatccacatcccctttaattgccaatcctgtagcatcctcaagtgtaaatccctgaagattagacaaaaaaacgttagacaggaaaaaaaaaactgtgaccatagaagtaaattatagaaaaatggaaatatattccatgtattctcaaattttaagctataagagtcacccttcagcatgtagaacaggagttattaccattatcacaaattattgagggtaaaccaaaattctgtatctataaaacctataacatgtacaaaaggaactcaccagaattttttgaactccaatacaataaagttaaagcaaataaaaacttatatctcaccatattattgtcattaagaagctagatatcgcaatttcacaccatctagatgtttagtaaaaacattggatgaaacacctatattatctcaagaatctcaagaaacttacagtccgatatggaaatgaagttacatggcgacccccaatattaatatggtatccatcaacaccagcacgcaatgtaaggacaaacattctgccctctactaaaggaaatggccaggtcatttctggcttttgctcacgccctataaaccgcttaaaccaagatgtcatcttggactctttagcatctaaaatgtcattccgcatccatttctcacaccgtctgtatccatcaactgccaaatataataacaaaaattataaggatagaaacagacagatgttaggcatcaccagactccccataaacaactggaatatcatattgacaataaaataaaaatattcataaaacaactaagacataagatcctattactaagtagtagtacatgatatatcgacactataacttataactacaataaccattacatctattatgctttatagctttatgtaaaatacaccaaccaggaaggtaaaccttatctttctgttgaccatgcaatgaccaagaattaaggtgtgcatattttcatgattgtttttcaacctttgttattccacctttacaatgatatcaaatttatattttacaataatgacaatgatggagactcaattctgcagcactttctttaaatatgacacacatcaagatgaatatgaaatatgatatatcataccaagcatttcttcttcatccccagacggcagaccatcacatctttgagaggttccccagtgcattcggtaacaggtattatgctcaattactggctgtttgctccaatccccccttattcgaggattcaagtgaaggatctttggaggatcctccccatccactgacttcagcccttgcaattcaaccatgaattgggaaactgaaactaatcctccacctctcttcatcttggcaagctggggaacatactccttatgagcataatggggtgtccccaccacagtgattgaagaaccagctgcaagcccacagggaagaaacatcaaattatctcctttaatcaactcatccccattcattgacagccaagaagggcatgactcgggctttccatcaaggatggagttttttattgaccccttctcgtcaaccttatctacgtccttccaagccttcaaccccaatatccatgcctcatccgccattctctcaagcacagacaaatcattggtcctcttatattcccgcattatcttcccagttatcctaccatatcgtggtggaatctgcttcggagactccggaaaacgctcttcctccttccttggctccgtgtttggtctcaagggggcaccctggtccctattatcttccaatctcctatgaaatgcatctttataaacagaactcacaaaagacttgctcaaatctgaatcttcagagtccccaacagctgccccctccaacctatcttcactctcatccccacttaacgttgatacaattctcaaaaactgtggaaacttgcatgacacaaacaacaagtacaacaccccaatgccaaacaaaaaatgagacaatctaaacctcnnnnnnnnnnnnnnnnnnnnnnnnnnnnnnnnnnnnnnnnnnnnnnnnnnnnnnnnnnnnnnnnnnnnnnnnnnnnnnnnnnnnnnnnnnnnnnnnnnnnnnnnnnnnnnnnnnnnnnnnnnnnnnnnnnnnnnnnnnnnnnnnnnnnnnnnnnnnnnnnnnnnnnnnnnnnnnnnnnnnnnnnnnnnnnnnnnnnnnnnnnnnnnnnnnnnnnnnnnnnnnnnnnnnnnnnnnnnnnnnnnnnnnnnnnnnnnnnnnnnnnnnnnnnnnnnnnnnnnnnnnnnnnnnnnnnnnnnnnnnnnnnnnnnnnnnnnnnnnnnnnnnnnnnnnnnnnnnnnnnnnnnnnnnnnnnnnnnnnnnnnnnnnnnnnnnnnnnnnnnnnnnnnnnnnnnnnnnnnnnnnnnnnnnnnnnnnnnnnnnnnnnnnnnnnnnnnnnnnnnnnnnnnnnnnnnnnnnnnnnnnnnnnnnnnnnnnnnnnnnnnnnnnnnnnnnnnnnnnnnnnnnnnnnnnnnnnnnnnnnnnnnnnnnnnnnnnnnnnnnnnnnnnnnnnnnnnnnnnnnnnnnnnnnnnnnnnnnnnnnnnnnnnnnnnnnnnnnnnnnnnnnnnnnnnnnnnnnnnnnnnnnnnnnnnnnnnnnnnnnnnnnnnnnnnnnnnnnnnnnnnnnnnnnnnnnnnnnnnnnnnnnnnnnnnnnnnnnnnnnnnnnnnnnnnnnnnnnnnnnnnnnnnnnnnnttattaaaaattattacattattacattagatatgagttttacacttttacttttatttctagttcactaccttttattaaatgttaactaatgaataagagtgtgaaaaaaatattatgttatcaatatctctctaaatattaaagagtattgaaagtgacggcatttttaattttcttataatttagttttcgtgtaaactggagtactttcttttacaaggaggaaataaaatccaatttgtgacattggttaattcaattggtatttttttaatttgtaataataataatttattannnnnnnnnncaagaagggcatgactcgggctttccatcaaggatggagttttttattgaccccttctcgtcaaccttatctacgtccttccaagccttcaaccccaatatccatgcctcatccgccattctctcaagcacagacaaatcattggtcctcttatattcccgcattatcttcccagttatcctaccatatcgtggtggaatctgcttcggagactccggaaaacgctcttcctccttccttggctccgtgtttggtctcaagggggcaccctggtccctattatcttccaatctcctatgaaatgcatctttataaacagaactcacaaaagacttgctcaaatctgaatcttcagagtccccaacagctgccccctccaacctatcttcactctcatccccacttaacgttgatacaattctcaaaaactgtggaaacttgcatgacacaaacaacaagtacaacaccccaatgccaaacaaaaaatgagacaatctaaacctcctcgagttgggaggatcacttttcgctctcttcatcttcaaaacaacaacacactttacaaacacaagaacaatctcctctcctcacaagaccaaattttgaaggcaaacccacattcaaattttcaacaacaaaaaaaaaaaagccatgcattaggcaatataaccgagcatttttcacgagaatttgaagaatcaaacctcaatgaagagggagtgatcgagtttcggaaatcaaccaatgtaacaaggcatcaacaaattgggaagaaacccgtttcaagtggaccccggagaacccttaaagcttcaagctttagacagaactccgcgaaaaactcgatctccacccttgaaccctaatgcacaaccctgctataatgatgacaattgaaatgaaaacgaagaggaggggacccagaattttaaaattaaaaataaaaattaaaaaatgaatgttcgttactttattgtattatttaatttaattcaattcttattcttatagctgaatttccgatactaactgtgtaccctatttaatgtctttcatttgcaaggagggtatttggaattttgttgtactgttgccattagtcaggaggatgagttttttttcttttgctgtataaggaggaggagaaatattaatatttaatagacataaataatccatcacagaatttttcatggtttgaaatttattaaaaattattacattattacattagatatgagttttacacttttacttttatttctagttcactaccttttattaaatgttaactaatgaataagagtgtgaaaaaaatattatgttatcaatatctctctaaatattaaagagtattgaaagtgacggcatttttaattttcttataatttagttttcgtgtaaactggagtactttcttttacaaggaggaaataaaatccaatttgtgacattggttaattcaattggtatttttttaatttgtaataataataatttattaactttactaaacctcttaaaagagagcacaagacgtgcgtttttaatatatattttagtctattcatttcttccaagacttcatatttctatttttataataaaatagttatttatttacggaaaaaaacaatttgtttaatggaaaaaaatgatttgctaaatggagatatgaacaacacaaaatgtaagttccttctcattattaagctgaaaaatcatttaaatttagtttatttttcctttctctgataatctgattatatatctttttcgtaaaaccctttttgttttcatcattttgggcatatgtgccttgcttcaacattaattagcttttctcatgtatcggtaccttgttcgactttctttattatttattagttaagggaaccacgttctcattatttgccggcctacgtttcttactttcttgatgcctaagaagtttgcatcaaacaaaaggaaaacaatgaaaatatcgattagttggcaaattgacaaggttattctttacctatataagtttaaagtaagatgctaacttaaacttggtctttcatttactgtagattttttcatttggaatgatctttagtgaaaaataaaatttgagattgtcaataaaacttacttaaaactttatatcacatgaaatatatttaagtatgtttaaaaatagttgtatgatgaataatttatacaaattaaaatttcatattatatgtttaaataataaataaataagttagcctataagttgaaatgactttcttaaaatcttaatcattttttagtgttacaataatgacatttttttagtcgactatcatatactttctttttttaacataaagatcagtataataaattttgtatctttcaataaaacctaattttctccagtataattaaataagattttctataaactaaatttttatgttaaacaagttagataatggagttttattatgtaatttattatttcatccctacatcattattagggttaattacattgatcactccttatgtttatcattattacacttgatactcctatgtttcagtacattacttttagtcccctttcccaaaaattgtctaagttattttaaaaaataaaatagaaataaaatatagttgtatgataatccaaatttactccttcattttaacattgttgattaggattggggtgacatctccttttttgtctacttcctccattatgcctgtctctgacgccaactttctccaccactgtgacgtcaaagaagagagaagaggttaagagagggtcatgcgagaacgagttgaagatcagaacatagaaagtttgatttctgaaaaaataaattgaatacaaattaataaaaggggacaatataattcacatactattccgcttttgtcaacagcattgctagatactctaaattatgtaaatacaaattatccttaattatggaacgtgtgtttattttttgttgttggtgtggtagttaagtagtactgattaaattgagttgaagtttttgtaaaacccaattatccttagttccatgagaaattgataaacctgcaacttgatttcttatatgaaagttgttaaagttccaatgttatagtgaacgagagatatatagggaaagatttgaagtccaattataaaaaattgtcttgcagcattgcaatgcatgggagtgcaaaaagcttcaacataaaattctttctcttatccatattgaaatctattttctctctacaactgcttttttctattttttaaatcccttgtttaaaggaggaaagaaaataacattttaggggaaaaaataatcaaatgtcaaatggattgcacgtgatttatttatgtcaaacattcaaatgatgttaacatgggaacgggcatctgttgttataaaaattggcctagtcatcaccctgattgagctattggatcatatattcaataggtgggttactttattaatttgatatatattttaaaaaattaaaatatatataatatacttaagaaaatgtaatcaattcatacttttatattccaaaataaaaattattttcatgatcaaactataatattatataatcatttgttactataaattatttataactattatcattaaataactaagaaaattcttatttttgaggattaaataaaaaatttattgaataaccataaataagtctggtgaaaatatataaaacatataaatattatatcataatcaatataataataattaattattatattattatcaagataaataataataattttatagaaacatattatatatcagttaataattaattattaacaatttaacatgttatagaaattgaagaaaaaaaaagaaaaaaaaacttctccatggaatcaccaagtcaccaagtttcatcaaactcattcaagtcaatttgggccaattgaattttcagtcctgcaccttaaccgaaccgtcctgcacattggatctcagtccaattagatgagccaattttaataactatgggtgtaaccatccttaaaaattaaggagctttttttaggaataaaaaatataaggttgttaaacgtgtaataagtgcaaacattaggaaaaaatttgtgtaatttactcttataattatttttatatttaagattatgaaaaggataaatattattagtttatcatctcttataattatttttatatttaagattgtgaaaaggataaatattattagtttatcatttgaattgagcatcagtgtgaatttactgatgtggattgttttagcttaactaaatatctcgaatttgagtttgaatatgtagctacattaaatactcggagaaagaattttatcattcataataattctttttgactcaaagaggattgaagatgcatgtggtttagacattttttatttctttagaatagagtgaaataaaattgaatcaaatgatatttatttcatttcattccacctaataactttattttctgcaagtttttttaccaaaaaatacaaaaaaaaaannnnnnnnnntcctctaataaccactacaagaagaaatgagcacttaatttggcaccattacagtgtcaatagatgtgtctcttttcaacaacagatgaaccctagctcgcttagcattcagccatgttgtaaggtgggccagtattttagacccaaaataagttaagcggagtggactaggccagcccacgaattagcccgttatttttcttcttcttctttaggctgtgtttgttttgaagaataagagtgatatacaagagaaattttatacttttttaatgtggaactcacatctcttacactttgctttaacttaaaaacttatcttttattttcatcctctcaaccaaacacacccttaataaaaaaaaaatactactagaaggaaatgaggttgatgggctcatcattgggcctaaagatagaacagtttttttttccttctttttaatgggttatcaaaataaaaggatgacaactataaaataacgaaacagaaatcagtgcatagccacaagaacatagccacaattaggggtgaaaataggccaggccaggtcaggctttgataggcctaagcctgacctgtttcactatcattaagcttaagcctggcttgttacctgttaaaaataagttattaaagcataagtttggcctgcataaaagtctggtctggcctgaaagcctgtatacaaaggctgattaaataaaaaaataattaaaaataaaaaattaacgtaatatcgatgcacaccgacagcccctacctcaaactgaagcccaaaatgcgatcctccaagtttaactactccatggtaaatgtccagaccattggagctgacttgtgttacacttggtttgatagagatttgagtgttgctagagtcattctatgaagtagtcataattcttatgtgtataagtttgtcaaaatcaaatagacctattttacttattcccacacttgccattcatcttcattagtatatatattatatagactttatgtcattcatcatacactatattattgttaataagaaaaaatatttttagaaaaataaatatattatttttaagttttaatatatannnnnnnnnnagtccatacaatataaatcattgatttttttaataaaaaataatattatagataaattatatttttttatgaactaatatatataaattagtaaaaaaaattaaaacaaaaaacttaatttttcttagaaaaaactcttttgaaaaaaaaaacaattatgaaatcggttccccagaaaaatcgatttttggggaaccaaagtactgtaaataaaataaaacaagtgagaaatcgatacttgctacagtagtagaatgcatcattgatgtaaatattttttgggttgaattatttggataaatatttatatttttgtattttttgggtaaaaaaactcttattttcttccacttaattgtaaaacaaatataactaatttattctatattcatttttaatttttaataatataataaaaatgtttcaacatgatgacactcagtgtgcctaatttatccctcaagctaaattccaaactataaggaatcatccgagattaaaaaaaaataataataagtgaagaatcgagatagagaagcaacaaaaatggttatcttgtcataccaacaaatgatttctctctttaaaatctcacttcacaccaaaatgcatataaaaaatcagtcgtaaattaaaacctttcgagaaaattatggtttaattagaatagtggttaaaattaattaatgactacttgaaaacagaaattttcgcacatattaagaacgaattcaattttgaaacctgtgtacctaaaatatttcttgcaagaactcgatatcatttggccctatctgaccttgtgtgttgtttcgaaaacgaatacatggcactcagagcaaaaggtaacgaaatagtaatgagaattgttttaattagcaaaatttataaagtattgggatatcattcggtagattttattttttttcaattaatacaaaccttcttgcgtcgcactgttataataagatagattttcctctcttaaactttcctattaaaataagttatttacttctcaaaaacctttttttggctcaaaatcttggaaagttaaaagtcacaagagtccaacacataatcgacaaaaaaatgcaaatttgattctcccatttttatgcttttttgctctcttcattttattactttggtttgtatcatttgttataacttagaacattggttaactttgcccatttttgttggctctgtgctgccataatttccaacgtagatatcagtgttgtcactaaataagggtttgatttggtccctaaaattggaagctgacgactttagagacgtatagactttgcttggaatttcgctactttgtcaaaacttgtatggtggggacatttcataaccatggctacattatgcacactgatgagcctctcaatcctacatctttagaaacggaattcacagtattaccaagtcccactctaacaagagcattacccttgcattttaactataaatttgcttgtgccgcacactaagaaaagttccatatcaacatatttatgcaagtagtttcattcatttataatgataaattgagagaatgagtcatgcgacaacgataaaattgtgtcttggtgacttgttaatcataaattcaaatccgaaaacagtctctttgcatatgcaagagtaaggttacgcacaatatctctctcccttaacttcacataaggatgaaccactcgacaatgagatacaaattttttttttataacgataaattgacttttttttatccgtaagaattgaagacatgttagggagtttacaataactcacacccctagttcaaccagttagaccccctccacaacgataaattgattgcaaacaaattcaaaataattggaaagatcaaacacgcggtattttaaaactctgctcactccttttgaaccccagcattttcattcagttttcacccatcataataagaaagaaatcacaatggtaagcctaaatttcaataaatttaggtttagttgaactaaaactggaggaacaaatagtattaaaaaagcaaactctctaaaagtgggaactattatttctttaaaaacaaacttaatcatacatgcactaaaagtaacaaggtggtatcagcatacctgggttcgaagtaagcacttgaccttaagaagagagtgtagcccttggcaccaaataagcgattataagtaccaacatgcactcaaccaagcatatacataaaaccaaaaccacataacagtaatttccattgtagtaaagcccttttccccctggtactcacaaggccatactctcgaaagggattattaaggattgaaaaacataaccatagttaataatccattaggcccacaaacaggtgtaacatggcataattaaatactccatttctcaaaggcacaatttatgctgaaccttgcaaaaattagaggaggagcaaaatcaaagttttcccttgtcttcctccttcatcttcttctgccaccttctcttcttgtaatccagcaacatctggggcatcttctccatcaacttcgcagtgtttgcgcgcttctcagcagaaatcctatcacatttgtgtcctttcctcctggttttcatctccttcctttcaggatcgtagggccaatcttccccagcaaggaggacttccttgcgaattctagcacgatgcctagcactgatactcagcggcttccatgcccccagctcccagtatccccacacacccttggcaagctcatccttatatttccccaacttctcacgccaaggatactgatattctgctaccgccttagccaccgaactaacacctttgcccgccattacataacaacctctttttctctacacataacataacaacctcaatcagacaaattcacaaacacctcctaggctaacatattttttttcctttttaaaccaaataaattgatgttaccaacttcatttttcacagttgttctctgaaggagtaacacattagtaaaaaaagaaagaaaagaagtaccgttcaaataaaaaaaaagggtctaaatttaatttaattataacaaaaaaaagtgattatgttccagggaggtaaatcataaagtcaattatggtgaataaagtaaagcgaacaaaacacaatttaggtcacgaatacaacacagaacaagtgggatctagttcataagcgagaaaaattaaacaaatgaagtaaaaacaaagttagacttacactttgtgggattgtcgaaccctcttgagtaattcacctaagaaacaaaaaaaattaaacaattaagaagagaaatacagtgatatgatagcgagcaaatcctctaataaccactacaagaagaaatgagcacttaatttggcaccattacagtgtcaatagatgtgtctcttttcaacaacagatgaaccctagctcgcttagcattcagccatgttgtaaggtgggccagtattttagacccaaaataagttaagcggagtggactaggccagcccacgaattagcccgttatttttcttcttcttctttaggctgtgtttgttttgaagaataagagtgatatacaagagaaattttatacttttttaatgtggaactcacatctcttacactttgctttaacttaaaaacttatcttttattttcatcctctcaaccaaacacacccttaataaaaaaaaaatactactagaaggaaatgaggttgatgggctcatcattgggcctaaagatagaacagtttttttttccttctttttaatgggttatcaaaataaaaggatgacaactataaaataacgaaacagaaatcagtgcatagccacaagaacatagccacaattaggggtgaaaataggccaggccaggtcaggctttgataggcctaagcctgacctgtttcactatcattaagcttaagcctggcttgttacctgttaaaaataagttattaaagcataagtttggcctgcataaaagtctggtctggcctgaaagcctgtatacaaaggctgattaaataaaaaaataattaaaaataaaaaattaacgtaatatcgatgcacaccgacagcccctacctcaaactgaagcccaaaatgcgatcctccaagtttaactactccatggtaaatgtccagaccattggagctgacttgtgttacacttggtttgatagagatttgagtgttgctagagtcattctatgaagtagtcataattcttatgtgtataagtttgtcaaaatcaaatagacctattttacttattcccacacttgccattcatcttcattagtatatatattatatagactttatgtcattcatcatacactatattattgttaataagaaaaaatatttttagaaaaataaatatattatttttaagttttaatatatatatatatatatattaaataggctagcctgataggtctaacaagttttttttaaagcttaagcctgacctttttatttaaacagacttttcaaaaagccttactatgacctttataataaacaagttaggtcaagtcagaccttaaataggccaaaccaaaagcacctgatagctaatctggcccattttcacccttagctacaatcaatatacattcaacattcatcatctggcccattttcacccttagctacaatcaatatacattcaacattcatcatcaccaaacagcacaaaaaagattattaacaataatgagtgcaaaggagaaggctggcggggccggtggggctggtggcggtgcggtggctgtgtggtgacggcgagacttggagttggaggcagtcaaaagactcaaaacgtaaataaaacttaaggaccctacagggtagtttggttgtgggggagaattttaaaaaatagtgagtcacgcgttactttttctctattttaatttaaatattcaatctcgtttctcttcgacaccaccaaacatatccgtaatagagcatgctcaggaaatgaagtgagtgggcctctctttgttttggcccaataatagaacttcctaagtctaagaattaaaggtccacagataagttgaatgtgtggagctaaaaagtttgaatcttaagtggcctagctattttaagacctgtatactatgtggtatgaaggttaaacggattgttcgtgtacccaaattcaaatgtataactccagtatatataaaggaaataaatgtgtttggtgtacatattttatatccatcttatctttgtaattacagtcatacattattatattttatcattataactattttcacatgtctaaaattagacactattttctattatcttttattattaagaaaaaaacatgaaaggacaattagacacgaagtgctgttttttcctataatgccatcatggaactcggccaaccttactattggacttatattgaaaatcacaactactttaattaattgttgtttaatatgtcacctagttacttagagttttttcattttattctatcaaaataatgtacttcataatatttttatttcaaataagatgtgataattcgaaaatgtcatgtaaacatttgtttttttgttttacgaatgtaaacatttagtttgagactactttatagaattaatattgtgattatatatgagtttatattaagtagaataattaagaaactcaatgtggtacttaagttgcaatgattggaatttgttaagaattggatcacaaaaaaacccacgtatgaagtgtataaagcaacagtatatcaaatacttaacaaatataagctcactttgacattagtcaagtgaaacttaactctaattttttaaacaatatcttgaatatgaacgttataaatgaaaaaaaaaataatcgagatgaaagattctattaaaaataactaggaagatttttaactaaaattaatcattaacatttaacaaaatcaataaatattttgcacctataacatagtataaaaatcacaaaaatatatannnnnnnnnnnnnnnnnnnnnnnnnnnnnnnnnnnnnnnnnnnnnnnnnnnnnnnnnnnnnnnnnnnnnnnnnnnnnnnnnnnnnnnnnnnnnnnnnnnnnnnnnnnnnnnnnnnnnnnnnnnnnnnnnnnnnnnnnnnnnnnnnnnnnnnnnnnnnnnnnnnnnnnnnnnnnnnnnnnnnncttgaatatgaacattataaatgaaaaaaaaaataatcgagatggaagattctattaaaaataactaggaagatttttaactaaaattaatcattaatatttaacaaaatcaataaatattttgcacctataacatagtataaaaatcacaaaaatatataaacatatagggacataaataataattcaatttacaaattaaggaagtcagtttagctatatacaaacatatcgatgttggttgacatagttataactaatatgtttaaattttaattatgtgcttacttgttttggatatcatctgacaataatatgattttttttaaagttaatttacattaaaatatttgaatctaatttgaatgtattatgagtataaaattacttttatattattatttgatgatgtgctgttaggttaaataattatatatatgaatagaaaataaataattatatatatgaatagaaaacatcatctatttctcccgttaaaaaagaaaaatctacttctaatcctatgatatcaccattgttcttttattttttggacaaaatatcaccattgtttttgttctcgacgattccgaaccactgtctttcttttaatagattttgccttttaagttatagatgtaggccactgtttgtgcttcttctattgatagtgataattttagtttgactagcaaaatcttgtcgttatatgaattgaagaagcacttcaggacaacaccgaagctcctctttctctggtcacgaatgaagcaaataataggcggaatgagcacttgttgatatttttagaccctgaaaagtgattccaacatcaaaagattgcggctacgcctagcttagcttcactgtgagagaagatcatatccagagctaccaatatttattatcaagaatagatacggcgtttctttttgcacattagtgtctgccataacatgtttggtcaatcaataatcatcagcaaagtgaactattctgtgtttttttaccagacaattttcacatatacttttatctctttctttcttcactgttatgctgcattatgtatattgtttttcctcatttttttatcacaatttaggtttatatagtctatgacgtaaaattatggtttttaaacgagaattatgttttagttattggtttcgaggtagaatcttaataagtaattgtattaaatatttgaaaaaaatattatccaaaataattttgtctaatgtgaaaatatctaattgtatatttagagcttaaagtcaagattatatgtgagaataatccacatgcatgatgatatttttaagagtaattttacttttatagttaaaggcatatgtatatttattattgcctataaagaatattatatttattattgtacatgaatatattattatgtttcttttttagaagccacaagaatattttacatgagagataattatattcgaaataggtagagcattggggataaaaaaaatctctttaggtaaaagtttaatgcaattacatatccaaatttaatcattagttaaacaaaaataattttgcatcattgatccacaaattcgataattgttatgttactttagtacaaatgtataatatgttattaatattctaccttattatataataaaaaatatattttaaaaatatatttaattaggacggtcaaattacagatttataattaaagatcggttgaagtcatgttttcattgggttttcttttccggcaaaaaaaaaaaataaacatatatattatataaaaatagataatacaagggtaccaggggaaccaagatcaaatactacactgcaaaccccatctacccagctcatatatatgttttcattggtttaactactcctattttgtttctaaaaaaaaaaaaactactccaattttgtacgaaagtaaaacaaacgaactactccaatttgaaaagcattatatatttgactgaaatctaattaaaacccaggttggttcgtctcaaagcatagccctaatttattccctatggcctacactatctaattgattcctcagctagatcttaaagtgctttctaaattaaaacatcatattttgtagcattattaaatcccaacagttggtattccttggaccaaaagatattactagtagtattgtagtaataaactttattagttaaaaaaatattaaaaattattactagtataatatttgtatcaatatatattttaataataattctacacttttaatttcttaaccataaattctttttagaattaatggcatcattgttgtctaacattttccaaaactccactcatcatgcttggaagtaatcccaattaataatcatgtggattcgttcacaggattttcactttcaattttaaaacaaaggagtgtccttcactgtgataaatgagaaggacaattgtttatttattgaaccttctaaggaggaaaagattaaaaaggttgtgtgggattatgatgggaacaaaagtttggatggtttcaatttcaatttcatcaaatcttgttgggatgttgttgaaattcatatccataaggtcattcatgagtttcatgttaccaggagagaggttgtccaggggaataaatgcatcattgctcactcttattcctaagaaggatgaccctcttgcataagagattttaagtccatttttctcattaggtgtctttataaaatcatagtcaagtagcttgcctctagagagttggggaaggtggtggaccatagataattgacattcttggggggaagaaatattttagatgggatcttgatagctaatgaggttgtacatgggggttcgagaaagaagaaatcttgtattatttttaaagctgatttcaaaaaagcttatgatatgatggaatgggaattttttgcatacatgcttcaaagatcgggcttttgtagaaaatggattaagtgaaattggtgttgtttgcgatcattgtagcatcctgatttttcacttattgatgactttaataatacaacacttcactcaacatccttgttggtcagaacctttcataggtagtccttttcgagacctcgtaaatcagctctgcctactttcaagatcaatgactgatctcataaaccaacacaagatctttcagcatgctttatcttcactcacacgctttccaagaaactttccagaaggacatccatcccataactactccaagacaagcatgcttaactttggagttttaagtgacgggctaccaaaaagtagatacatcttgttggtataggtagtactaatcaattcctttaagttatcctcaaatgtgcaatctcacagaagtacagcctctggatccctgtcatctagtgtgatttggtcgaggtgttacatgcccaccaatttccgcctagttcgtcctcgaaccacaccgtactggggagagatttgctctgatatcattttgaaacatccctgattttttactttttggctactctcacactacgacacttcgcgggatgtcaattcactcaacattcttgttggtcagaaccctccatcgatcaaaatcctccatcggtagccatttccacaacttcaaaaatcagctctatctgcttccaagatcaatgactgacctcacaaaccaacacaagacttttcaacgtgttttgtccttattcgcatattttccgaaaaacttcccagaagattacccatcctataactactccaaggcaaacacacttaactatgaagttcttaagtgatggactaccgaaaagtagatgcatcttgttggtataggtaatatcaattaattcttttaagtcatcctcaactgcaaagtttcatacctatacaacctctagatctctttcattctggtataattcaatcagggtgttacaatcatatactacctttgtccttgttaatggtagccccacagaggagttcttggcacaaagagggcttagacaaagagatcttatggtgccattgctttttttggtgttgcccgggggggtgagcggatttgggaaggtagcgaaagcaaaacggctcactttcgggattggtgttggtaatagtagtttgaatgttacacttcttcaatttgttgatgacacacttttcttaatgaaggattcatatagggattctattactctgaagacaatccttaaatgcttcaaaatgactttcagtttgaaagtgagctttttcaaaagcaacttgcggagattcctgtgaaggatgaagatgttgctaggtaagaaagggtcttaaattgtgcaactatgtcaattccttttgtctagttgggattgcctattagagcggatgcccaaaagactagcacttgacaatcggtgattaacaagatgagaaggaagttgtcctcatgaagaagacgacacccatcttttggaaggcacatttgtttagtgaaatcgatactctcctctttatcgctttattatttatcttttctcaaagctccaaaatgtgctattagtatcttgaataggcttcaaaggaatttttttctttggggggtcaaaggagaggagcaaaaagtttattgggtgaggtgggatgtagtatgccaatcaaaagaaaaaaggaggattggggattgggaatctaggaatcttgaataaggtcttagtgggtaaatggttttggaggttgttgagtgaaaatgagtgcctttggagagatgtacttacacaaaaatatgaaattagggatttagataggcttgttgaaggatctttgaacacaagaggatctcaatggtggaatgatcttgtgaagctttgtgaaattaagggtagtgggatggttggttccaaaaagatgttaaaagaagagcaggggacgctaacgaggtgaggttttgagaatcaagatgggtaggaatgcacacctttgttcaaaattcaacaggttgtatctaaattcttaacaaaagttgctcatgattgcacaagttggccaatggtgcaatagtacatggacttggactttggcttagcgtcggccttggttcgtttgggaacaaaatatgcgacaacagttgtggaacttgattggtggtctgggaccgaaagttaatgttgtggatgggtcggattggtccccgagtttggagaaaaaaatcgttgttaaagaggtgtatgaggctaagatcaattcgtatgacccagataaggaggagttctacaacatcttgtgtaagctacctgtgccatcttagaccaagggccttgtgtggaagcttgctcatgatcgacttcaacccaaagataatttacataagagactaattcttccaccgggtttccaggttcaatgtgtcttatgtaacatgcatcatgagaatgttgaacaccttttctttagatgtaaacttgcatttgtggtgtggactcagtgctacgtatggatcggggacatcggggtgctgccaacaaattatctaatgcacttttggcaacatctaggaggaattgatggcaacaaagcaaaattggtttggggagcggtgtggacattgatcgtttggtctatttggaagctaaggaatcatatcatctttaataacgtcgcttgtaatcttcaaagtctgatagatgagtcaaggtacatggcttggttgtggtgtaaaacatatgttaaagacttcgattttacttgtacgtgtggtgcatgggttatcttgtttcttcaagtttgtagacaattaatgtgggatttgtgccgggacattgcagggttgataacgtgtacttatgatagaagaaatagtatcttgtttgggtaagtttctctagaaatatttctaaaagaagaaaataagaataaaaaatgaaattaattttttcataagtaaaaataagttcttcattaattaatcttgagaaactcatcaatacagcttctctaaaagatgagatgacatctataaataagctaatgaaaaacctattttagcttatggagaagctcatttcatttttttcttcttctagaagttcttctagaaaagtttatatccaaacaggttctaagtatttgtcgggcagaaaaataccttgcactagcttattggttagctgtcaagaattttttgtatttcctttgtggttggacatttcttatgccaatcactttttgtgtatatatatatattgaacgctccattagttttaaatgaaattcagttccatggagaatacctttatcctcaaatgaattactccaatgagaaaaagaaaagttgaccatcccatctctaggggaatattagtggtagtagtatatttttccttttccatgtgacgctaaatattttatatgcaactcaaagctgaaacattttagtttaggcgtttcaaaatttcccccactacatatttgactatgttaagggaacaacacatgcatgtttgacatctcttgcaccacgggtgacttatttgctgcatggtatagatacaaagtggtacatccaatgtaatcgtgccacatttccaagtgtataaaagagacaaaaattagtaacagtgatatataattagagcttaacaaattgaattattaatgcaaatgacaaggattagagatttgacatgcgtgaaagacagaatgtttagtgtaggggattgtaggtccattttcactaaaccaagtattatagaaatgactagcaagtaggctagctagggtgattagcaaacatgtattataaattgaaacaaaaaaatgatcctataatgagatatgtttttcctttttgatgcgttggaatctcttatgtcacccaaaacatggccaagaaaaaatccataggggctgctggcgtgctttcatgctgtgccccccttggttgccaatatatacctttggtcaaacatgtttcattctgtgttcacctctctctagcaatgttgtgctctaattctttgggggcttgtttggtttattttttgaaaaagagacatgcacacttaggataaaccctttttatatcttagcaataattgtgattagcgaccctttcaacttttctttgtcacaaattagtcattcagattacactccatcatgattaagatcatggggccccactcaaacattccgttagggtttgcctcttcatcattacctttctactgtattgctcttggcttgtaaattaaaaattaataatatatttaagctggcgctggtaatcacatcttagcttcaagttagccaattagccgtatgcatttattcaaacaggataataatgtttatttttacctcatttatttttctatcgtatcgtttcaattttaagtaatgcatagaaaaacacgccttgtaaatttccctttactttctttttctccagacaagcatagatagatgtaagaaaatgtgtaaaaacactatgcatacaaattattcccattaaatatcaatatacaggagtatagtatttttttaggaacttaataatcccttgaaaacgcattaagttgtccaattaatatgtgtatttgtatttgtccacacatatttccagaaatatataattaaatgatttcaatacgaaggtaaaaattactactttatgataaaatttattttacatgtttctaaaatgtataatcaaatcatttgccatattataaagcagttagcacaaaaatgacaatctaactaaaatatagtatttgtaaaatatttgagcatgatttttcgaaataaacttttgttcacttcatgccaagaagaagctttccatttaatgaaaacgctacctctcgttatttcatgaaataaaaaaatttaattacaaaagtatctaaagaaatcttcatttgataaaagataaaagcaaaattatgaagataaactatccaaacttagactagtagatacgtgaaatctcgggtgattagggtatgtttgacagggtttttatttggtttctcctctccttaaaagtaaaagtgttggattaaacattaaaaaaaaaaactgtccaacttggactaccgcatttagattacatgtcttggaagatagacacacatgaaagaaactattgcatgaactgcacagattttgatgaagaatggaaacattaatacttttgattggtaaggaatctattgaggggatgagttttatgcttgctactcaaaacctgattgttgctgctggaagaaaggaatccgtggtggtggatatgtattggcttacggcacttttatatttatattgggattgaagaatttattatatggtggaattaatgtagcatggtttttatctattatccgttttgacatgagaattaaaaagtgtagataaccgatatgtatagatggttgtaaatcattttgtatatgggttttaggtatctcttatgagtatttaatatatttattttgtcgatctataaaaaaaagaaagaaactattgtttacatatcatcacctttagccatttaactatagattctttaaatattaaactttctttatatttttcaaatatctccttaaattagctagcttgttctttctaatactgagctctttctctaaaataaaattagctatttcatttttcacttaatacacttttaaataggttggtaaactaagtcaaacttttatattatatttaattttgaggataaaaattaaaaaaaatgaaaataaaataaaatataaaagatgagttccacttaaaacacacaaaatttttcttttatttttctcttctgtttctaaatcaaactcagcctgatgtaacctagttttttttatttattattattatcgtttttcgataactgtttgagatctagtggacaaatttgaatcacaaattctgtaggatcctcaaaattattgcacagggaaaggtctctcaattataacatacccttttctacatttgtgtacaaatacagtaatctgtatcttcaaaacattataggcaccaggtaattatcatgggtttgacgttttataggatagtttccttacatgcactgtcatcatgccagctaccccgagtggcataatttttcccaaaatcagttgctcattaaattgttgcatccgtattttttggctttatttattgaatcctatttaagtgaatctgtacacttagaaccatctagctacaatttagagatgtgacttcttctgcctaagagcaaagaccttacgagatatacagattattgaaaggatctcaattttaactaacgcttttggacttacatgtatgtacagtttatatagcttggagatattattatagcattaacttatgaaatttattatgatattccaattggaaaggcaaagttaaaagtctttaatgtgacattacaatagattctatacgaatattgaaagatcgcaacctacttgcaacttatctctcctctaaaaatcacattgcgtagaataaaatggaggatagtaacggtggattttggttttttcaatttgtagtaaatggaattaagtttgagagaaatgtttttgttttaaaatactcgttgcaattactttggtatccctagcaattttgatctttttttaatgttaaattacaattttagtttctcttataaatttgtgattctcatctctcatgatctttagttgataattttgattctcctaatttttaaataagcaattttgattttccatccaattatcctgattgacctttagcatgttaatattgaccaattaatttgttagggtgacacaaaaccttgtttatcaactattaactgtgatttgtagctaaaatgggtcatctttgacctaaatctttctaacccatcttcaccaacacagtggcgctgcaacacccccacctacccttcttcatcttcttcgacaccacaaacactacaaccccatccaccattgccatcgtgcccccttctgaacccatccactagatccgccatcagaccactacgcaacccatgtcacaccaccaccaactccgacgtcaccataacaccaccaaaccaccgccaaccaccacaaacaccaatcatatcaccaaaccgcgaccaccaaccactatatccaccattaatgttgatgaccataaccagcaagggcgtcgacgtctgccagctcttgtgtgaccttcgcgtggcactaattctcgacgaggaagcgcgaggcgatgatgcacggagataatgtgctatgacgcactgatgcggatcttgtagagaagctcagttccatcggtcctgaaggtgcggtcggcgacgttgagggtgccgaattgcgatggggggccggggggcatcgaggaaagctagaagtgctggttattcttgctactgcggcggagctgggggcttcttaaaggaagaagggttgaggaatgcggaaagctgtaagctgtttgggttttttctttaatattttaattaatttgacattaacttaataaatctattaatcataattattcattaataactaaaagataaatgtgacatgtcataaattatttggtcaatgttaacagtttcacgctaaactgaagttagttaacaaaataattaaaataattaatttaagaaattagaagatcagacttgtctattaaaaattaaaaggacgaaaattacaaatttataaaattaaaaatcaaaattacaatttaatctttttaattacacaattattagtcctcaaaatgaaatttatgatttaaaaataataaaaaaaattaaagacaaatttaaatttgtaatcatctttttcttcttttatcatctaaatcacttagtcgtttaagaattattgagggtgattgtgaatttagtttttaaatataatttttgatatacattaaatttgacaaaaatggaactaaagtatttttaattcaattttttttattttttattttttacatttattttcaaaaccaaaaaaaaatatttttaatttaattttaaaaagtacaatcttcttatatttaattgagttttgtaggtgttactaccaataccaaaaccaatatcatcaccattattatattgtcattattattagcattgttatcattgaaagtatcatcatcatgataactaccaacactattactactaatattattgtcatcatcattactataaacatccattcactagtggagtcaacaaaaattttaacacatactaaattttaagtagtttcaaattttatttttaatcataattaattatataagtatatataattattaaaaaaattctttgtcacttaataactacaaattttttttagataatatcttaatcatttacttatcaaagagtgacttcgtcgttatcgtcattaatattattatgatcattattgatattattattgtcaccattcatctaacaatatttttgttgatttcttcatcaccaacaaatacactcttttaataagtttcaaaacttttcaaatgagtttatcttgaaaaaaaaaagagagagagaattaatattaatcaaattttagaaattggttttaaatttttttgggatatccgaccaagcccaatatccgcggctccacgtgtgtcacgactcactcgttcgtgaatcgtgagtgagtgagtggtctgacgctggagtcctactccgtaagtaaaggcgtcacgtaaaaaaaggaaaaactacggaatctatcaatctatctaacttagactaagagtctgagaaaattcaactcacaaggacccgcaaatcttagctacaagaatgacctgttccattttcttgatatctttcagccttttccactcacccctctctttcttacattgaaaaaataaccatgaaaatgaaaggctacctagatgtacatgattatccacccgacccgttcatctcttcctcaatatgacaaacattggttgaaaatgtagcgcagcataattcaaatatttttattccaagaatgttttcacttaattcgtgttctgactctgattcgatttgtggtatgaaacataaaaataaaagttcaatatagttttagtataatttgtgtttttcatatcattttatcaacataatgaacaaaaaaaaccgagtcaaggtttcaccggtaatgttaacgtttattcgtcttttccttgcttcttttgctcgagatagatagatagatcttcagctacctaagcagtaagcaagcacctcatcaaatacttttacaacaattttggctgaagctaaaatcacgtttttggcccacaaaatggggttacacggtatttaaaattattttacaacttttaagattctcaaaattaatttgttataaagaaaaaaaatattaagtttatgcttatagcccttttagtaattttagatataaatgttatatttttaaaaacacgttatattttagataatattttattatacaaattcgctattaacatattatattcaaaatacaaattaattattttaatgtcaacctttgtaacattatttttttaataatgtatttcgaaatgtaaaccagacggaaccttgtttaaattacaaaaattaatcttattttcgtacatattttaatgtaacatatacaagaatgattaatttaaacacacattttaattaaatgtaacagttaaaagttaattctatcaaactttaaaataaacatgcacagtgaaaattattgtgctattaaatctagcagaaacttgcaacaaaagagcaatacatttttatttgttaaaagggaaaaagtaattattccttctgttctagttttattgtttgattgaatatttaaagttaaacaaactttcatcaaaatggaactagaaagcatatataatgctatagacactttacctgaacagctattatatcataattctatactattatgcacgtgttagtgattcggtcagaagttcagaacatcctattcgtggtactctttaaactcctcattatattaaactattttttttaacagcgttatattaaacaggattgacgtgagtctttccatagctcaagtatattgatcaataggtatatatctaattaaagcaagaaaccaaattataaattcatattattaatgagattagatatttgatttcatatattataattaattattgattttgattctaaaaacattaaatatattttcattttttttataatatatatcattcatcttaaaataaatgtcatctttaatatttttacacaatcaagaaaatataataaatgaatgaagtaataaatttacaaaactttaatcttgacccacttgtccaactataaggtccctaattttttggctcgcctaatgagggttcaaaaaaccttcaaaccatttaataagtgacttggatcataacttaaggagttgtccacaaattgtgactattttaaaaatatttgtttttctcaaccatccacaaaaatattttcaacttgacctcaatcacaatatatggaaatcaccctcgaccaaaataatcttaattcaactttgactagagtacgtattttcaactgaatatcaaacaaattaattttaacttgattagtatctttatctaaatctcatttaggacatttttacctcgattatgaccccaaccaatacatttttaattaaacctcaattagagcactttgactcaacctcaatcaagatgtctttagcccaaccttttccaaggcaaagtgtggcattgtggccgaatggttgtagcaaaatggtccttatttgtagcaaaatcaactcgacctcaatcacaatatatggaaatcaccctcgaccaaaataatcttaattcaactttgactagagtacgtatcttcaactgaatctcaaacagattaattttaacttgattagtatctttatctaaacctcatgtaggacattttcaccttgatcatgaccccaaccaatacatttttaattgaaccccaattagaccactttgactcaacctcaatcaaggtgtctttagcccaaccttttccaaggcaaggtgtggtggcattgtggctgaatggttgtagcaaaatggtccttatttgagagccctaatttaagtttcctccctataatcatgaacttactatatctagttttcttttggtggttagtatttggtttggattaaaaaaaccacttagctaaattttggctctgaatttaaacttgtgtacttaccattgaatatgtgtatttagatatgtgtttggcctaaaaagaaagggataggaaaagaaagaggaggcaaatagaattgggaaaggcagggaaaaaaggagaaagaggttattggaaagtgaaagtggaagggaaaaaaaattagggattaaaataaaaactggaacatttagtaaaactataacttaaactgtgtaaaatgttgtgtcatgagtttgtggtcacatgatatgcaaagattgttaagttaattaatttatgacaagtatatcgaccatacaagtaatatattaacaagtacatatacatatagttctcacaaagactgttgcaatgtcttattctcaaaacatgtagatgtcccctatattgagcgttgagttcaacttatatagcagcgtaataaatttcaactccattaattaatgttaccaacacctactgcaacatattagaattttctcagcagtactctatgttgggatcaatgttttaagcattagccccaaagtatcaaatttgattatctaaccctaaaataatggtaaccctagctagttcctacatatcacaaaccctaggttagttgaccttacacacttgggttggctcaagcataaggcgatcgacaaaaaaaaaaaaagaagagttatttagaattaacatttatacaaaatttataattttataattagatggtctagtttaatggtaagttggtaattaaggtttgtttttcatcagtgaatgggctttgaacccgaaggaaatttacttttgttttttgtaacacctctattttttttaagacctctacattttttggccttcaaaattaattagtcatgaaattcaatttaattaataggctgtttattaatatatcaatcctcaccaaactacttcatcaattattgttattaattagtgtttttgttaaaaaaaatattattgttagttttaataaaacgccaccttaaatttgttttaagcctggaaatatattaggtcatccttagcttgttacacaattattagcacacttttccttttatcagtccattatgtagcacacttataaattggactttaacccaatatatattcatataacaatatagataataatatgaatgtctaaacaaaacatccatattatctatttaacctgctttataaaaataaatccaccagtcaaggacggattcaaattgagctttgtgaggatagctacaccgacaagtttttttatctgttttttttttaatataatgtatatgtataattacaaactatttctataatttaaaatgtaataaaagacaatgcataatataatttttttatattttattttatgtaactgagaggtatttgttatcggttgacactcagatcccataaaattcattcattttgggtaaagtaatatttgtagttatgagtgtttatgttcaagttataaatcaaactctaaaactcagttaattaaaagaccaaaatgtcaaactccttataccaataattttggtttttctcattcatttcaggagtgtactgaccatttgattgtaaaacagaactgtcaaggacttctgcgcgcagtaaatatgtttttgcaaaatatctacatttttttgccactaatgatgcatcagacaaaagcttaatttggcttttaacgtaaggatcgtgtggctctgttgctttgcgcagttaaaagtgaaacttaattaaaagcatccctagcttatctttctatgtgtgagtaaaagtcccaacaaaaatgtgacgaataagtaaacgctatcatacttgcatagttgcatagcagggatatgcagatggacgttgatgttattccacttaatataatgattggcttctcatactattgctattgaatatggaattcgcatgaacttaatctgtataaaaccaaaaaataaataaattacaaagactaggaatacttcacattttttactaaaagttttagtcactaaagacagtgtcgaatttttaaaaatttaagttgtagaagtaatatttgtacataaaaatatgtgaaatattataaactgatctatttaatggtatttgaaattatgagaagaatgtataataattttaaaatcttgtaggtatagatagctgcccaaaaagggacaacgtcgattcgtccctgctgagggcatgctgaagctaattaaggtcttgggttcattattcaatttttgttactgtaaccttattaattaatcttatactattaataagcatagtattatccaataatgtttactttcattaacaagaaacaaattcatatatcaaaaaaatgtgattatgtagatttaatttttacgcttaattcgatccccttgcattggtggtctctctcttccctcatcgcatgcgcttgacttcaaccagggtttaagcctttgatgttaaattttattaatgagtaatatgtaaatatttctgtaaacattttttaaactttaaggtctattttaatttcaataaactcttaggatataactcattttaaatatttgatatctttttctttaaatgagatctcaattttttataataattttattaaatatcttacaactataatgtttttttctatccaaattcatctaaacttttttttttctaaaaataaaacacatggtatgtttaaataatataaccacaaaaatgacacgtagaaagagataaaaaaaaaactagagtgttggaaagaaaccaattgcgtatctccaactttgtgtaagcagatgtcacaatcgactttgaggaatttacatggatgccaccaagggcaagaaactgttgagcgttctgggtcggagcaataaaacgttgggtatgcgtgtgtcgttttcctctgagagcgaccaatagaaaaagtgccgtcaagtcccatcaaggaactcttttctcttattggacctacctttttcttttcttttcctcgcccatcggatgccattcatccttcgttttcgtacactgaacactcgttttctgtccgtaggatcaacgtctttgcgtcactgcgtttatcttcctacttcaatttcaaaaaaaatatcattttggcttaagtttttcttttctctcagaagattttttttcttatatttcaaatcttatacaaatatatttcatctctgatttattagaagatatatttttatagtcattaattattaattactatcacttttgttttttttatatgatgatgcattacagaattatgttaggtcacgtgttgataattaatgtattatatcacatggaatttatgtgaggactgaaattaaaaaataataataaattaagaacgaaatgaaaaatatatatatatatatatatgagaatttatgaaattaattttttaagataaataagatatttaaactaattatatataggttgctctttgtttttaaatgtaaaataaaagaatttgagtatggaagtatttggtttaatttatttaaaaatatattttaatcaaatttttaaaagatttaaaaaagcaaatattttaagtcaattaacatatatttcattacatgttgatatgtcacaattaagaatagaatagaagtagacacaattttctaataatgacgtatgacttagccaacatcaaattattcaggcaaactcagactttttcaaaagtagattggacttcgacttcggtaaaaatctatttgattaaaaatgtcatccttttgagcctaataaatcggcctatttaaataaatataaattataataatttgtttagtattattattatattaaaattataatagatttatgctttatttagacaacttacaaaataggttttttaacaagttattttaaaggtgataaacttatattattgtggtagacttgtctcttataaaacttaattaacttatttttacctttatcttattgagtaacaacaactttgatttttgtataaattatagtttggttcacatcaaattttttttaataatttatgagtttgttgtctaatgtaaagagaagttagatatatataaaaatttgaatatgaaaaaagtcttttaagtaaattaacatgttaaattagacttttaaatagtccatattagacctaaaaataaatcatatatcaagtaataagtcatgttggatcaaatcttgagttttttaaatagacttaatttaatctatctaataaaaatcttattcgacctaacatattttcactcctagttataataagctaaaaattcatttaatatgaatttatgaaggtaatatgtaaaaaaaacatgagaatactttttaatcacatgttatattttaacttttttaaaaaagaagggcataaaatcaaaatataatttcaaaatatttatcaaaataaaataaaatcaaaatttattacatgattagatgtttttaatttttttaatcctttttagctgtgagtcttgttcgttgcaccttcgagcaagactagggccaaccctgttattaattataactcaaataatatacaaatatactaaataagaaatgtaaactaagaaacttaagaactaattaaattatactttaataaattgtgtcgttttatctttatttttttattgttatattgtcaataattataagaaatacgtgtnnnnnnnnnnataactcaaataatatacaaatatactaaataagaaatgtaaactaagaaacttgagaactaattaaattatgcttttaataatttgtgtcgttttatctttatttttttattgttatattgtcaataattataagaaatacgtgtgaaaataaaatcttgtttacacagggcagagagagattatataagtgtagattacactaagtcattgattattatgccnggaaaagtatttattaatctgtatatattctcaaagtatgtcttacatagggatgtttagttgaattagttaaataatgtgtataaattattataaacatcgagtaccttagtttaatttctacgataagaaaatgtcttacattaattttgatgtacatatattaatccacaaaaacaaatctattaattaaataattaatattaattcaaatgaggagtctctatgattatattagataattgatattaataaactaaaatttaatctaataactagataatattaatccaccaaatttcagcaaatcctacctaaattcaacgaagattagctcgtgtccaatagattgtgtatactagagagtagagaaggcaaaacacttagatttttttgttggttgggtaattttcagaattccaaaaatagacccaatacaattatttgttaataaactaattaatttatttgatttttcgttttaattagattgtttgaattttgaaccctcagtgatttaatttaagaataagtggaatgaaataaaatatatactcgagaaatcaccttaatatggttacatacatacgagactgctaaatttagaaatcacatgggttagttccatgccacattaggcttaagcctaataacttacaagtccacatctaattaaagataatttggttttgtaggtaaggtttagctagttattaattaattggagacaaatctggagaaaaaagaatttaatagtttggtaagagctaggatattgttgaatttgataaaactttcattggttatattttattctgtatggattggaattagtctttaacttcttcaatacttagctcaatagctggatttgtatgcgggttatacttcatgagttgatccatttaatccatagttcacgtgaatctgtccatttaaattcgactttataggattaagattttggtatgcagatgtgttaaacatttagagaaagaaccttgtcaactataatgatcttatctgattactttttatagataatacatattgtttagacaaaaataaataaattaataaacaaaaattaaaacttagttgaaagtgttttccaaacataaccttaatatctaaatatttttaaatagttaccaagaataattggctatataaagtacttacaaccaagtgctaatgcatattttgaaataataagagattaaaaaattatctacaaaataattacattgacatgcatttattttgagtgagcctcacagaatccctcgaagccaaacttaattacattaacatgcatctttttaccctaaagagtaaaataaggaaggctgttgttcttacaagtcatttggaatccctcacttagttctttttttaaggtgagctcctctgtttctatagtgtgtgaagatggtcctatcgtactacaaaggtcctatgtgtactaaggtggggaaggagtttttgcgatgccatgagaatcctttcgaagtaagggttgcgatccttgttgtaactgtcatattgggaatcttgtgtgtttatcgaattaccgagagtgatctaaggttattctttacggtgtgtgttcttaggattttgtttgcccttacactgaccaatcgaggttttgtccatcacaactatatatgttaggataaaagttgaaaaaaatacttttgtaaattctaatgcacaaatttgaatcataatatgcaaaatgaagaagaaagaatttgttgcttcatgagtaaaaatactttttgagttgtcaaactaaaattcaaacatgcacgaagtatttagatatgaataatcataccagaatgttatctaatatataaataaaaataatttttgagatgtccaactaaaatccaaatatgttcctatattgtattcacataatatattttttatgagtaagcacaccaggatgctattaacatatttttttattagttagttaaagttagttaaaaactataaaattacaaataaaaagtctaatctacacaaaatttaatttttttggtaaaatttaaaaaaataataaagtgttttttagaaaattttggttgagaattaatatatatttctccatactttgtatatcaaaggtgagcataagagttgttgaatcaagttatgtttgaccctaattcgtctttaaccctttgtttggatgccaaaaaataaggaaatcaaaggaaaaattttcaaaatttagtatagatcccacactctcattactctactttaagagaagaccaagttgacatgaactataagtaacacaagttcctgttattttaattggaatttcaagaataatttgtatctcatcattatacataatattatgtaaatttaatgatagttgcttataaaccatagaaaaaatgtttttggcatcagtatgaaaaaatatagacaaagtaaattaataggctagagtttttttttgtctagaaaaattctggggatggaatgataacttagtccaagataaagaaagtctctggattcagaaaacacttacagaattatttatatttattttatcccaaaaagataggtgagtatttgaatatatgatctgttagatgtgagactttgttttgcttcactctatcaaaccttgagattatagtttagaatttttcaacaaataaaaagaatagacggaaaaaatataataatgactaataaaattaggagttgagcaaataatagattaagccgagatatatttaattataactcgttcctaaagttttactggaccaatttttagattctaaccatttttaaacccgaataaattggataatctactattggattgtgttttgcacaatcctagtaaacattgctctttcggcttgatcgacataacggttaaaaagaagcagtaacattatagattatgtattcaatatttcccctatgttttttactttttactttttatcaccatatgttgcatgatattaatatattcatgggcagatctagcttatgatttcaggggacagggtctctccttaagtctttccaataaattttaatatacttttaacatttgtttctctttaaatctttccaataaattttaatatatttttaacatttatttgtaatatttgttaattatttttattgcttattatatagtttgcggtgttgttaattatttttatgcataattcataccttaacacttatttataagataattaaagtctttactcttctttgaaatgagaagtacagtttaatcatatgcattttataaaaatattttagcatatattacaataattaatgttgaaagatctcaaactcaatacttatatctaaactaattttcatattatcattataatcttttgaaatcttatcataaattacaataaatttctttaaatattctattcaatctaaaataataatttgatataattatttatttatttttttagattataatttataattatttattcttttaaattttctttataaaaaaaaatttcagaaatactagcccccaacccaccatcaaatcaaatgtacaaacaaataaattttcctaatcctatcaccaatgccccctgattatttttctaaatccgcgtgattatacttgagaaatgatcattttcatgaagcacagatgccttgacactttttgactttgttgcctattgcttattgggaatcgagagttcagtttgagtccccagttggaccagataattgtgcttgacagaaataaaaaaaaaataaaaccattacatctgcaaacatcccaattctacctttgcatgagtgcttctcgaacaagttgccttgcaatgatgctttaagatcctgaacatgctattgctagtttgctactacttccttatccttccatgcatgttaaatcacccccctagtggccagctacaagttttcttctcccttcataattaatactacattaatgccatcataaaaattaataatatcattcataatttcttttttgtttccatcggacctgaggccatattcatactgtgtttgatcttgactcaaaatgcttgattagtttgagttgcaagtattgaccaaaattcaataccttgatacatccattttaatatgtatttgtgtgattaataaattacatcttgattcagaattaaattacttttacttttggtgggagaattaaattactttattgttatacaaagataaaatatcactgttatttttggtgggggaattaagcaataccttcggtgtggcacataaaaacaattatttaattcattaacatcgataaaaataattatatttattgatttataataaattttaattttattttaagattatttatgatattaaataatttaaaataattttatgaaaaaaatataaatttataatttttttacattgtcatttactatgtatagtaacttatttgacaattatagtaataattatcttaacaattatacctaataatttatgtttagatgaaaatgacttaattattaatttgattctcaaattatttaaaaaaatacaatttgatttctaaattttaaaaaggtttaatttgatcatcaagttctcaaaaatgaattaatttgatctctgaattcgattattgaatttgaacaagattaaattgaatcattttaaataatatgaagatcaaattgatttatttttaaaaaaattgaagatcaaattgaaccttttaaaattttaaagactaaatttaacttttaaaaaattagagaacaaattgtcatttaaaataatttgagacaaacatgataattaaacatattataattttttttagaatgtcagtaaataattacttcattgttagcttaaacataaaaatatattttataattaaactcacttctcccaatgtctcaaccttgtgnttaatttatgacatcaatgaaaataccatgataaaagttgtttcgtaaagtcagtctataatagtttcttatactatgttttaagaccgataattataggaattagatgtacaaatcatttactccatttttgttttacacaacttaaacaatcttctgtaaagaaagtaacacacttataacctgagaaattaaagtgaaaatttactcttacagcattaatagtagtaatttttggttacattagaatcgattaattcagcaaatcagtaaccgtcattttcacattaaaaagggagaaaataattgcacgagggcagctgtagtaaaaatcactgatgtattttcacattaatttcttttccctcgttgattgtctgaaaccgtggacactcaaaaggtcatatcgcattcacatgatgtattaattaatatactaaattataaatactgtataaagcaaaaatgcgaaaaatagtgaaatgaaatgaaatcttctctctctctttctttctttctctccctagaaaagataaatcatcatctgacacagggacacactctctttctcctccttaaaaaacacccaaaaacaatggtggttctgtcttcattcgctcaagcatagaaagagaaaaagcaacagtagcacgaccatagtcgccgccgaaactgctacccattttccattattgttgcttagaaaaagaaaagaaaaaaaaacccgacccgttttcttttttttaaagaaaaaaaactctaaaggtgttgtatcacactgttttcttgtcccttccgtgaaaaaggaacacgtacctacgtttgtaaccgtggtcgttttccgttgcaacgtttgcttcggttttttgtgctgtggagtgagtgcttgtgctgattcccaagtccattttgcgcctttttcccggctttgcttgagatccggtaccctttgggatttgtagctcctttcgctgagatctgtttcgttttggagtttcttcgcttgtttgtcttttcacgttgttgccaaaatttgttggtgatatagaaaaagggtaaaaagaaggtgctggagcgtgttacttgctattggtggttcaagcgttgttgtatgatgaagtgttgggttgaagatttgaactctgggtggtgggggttgaggagggttagaagcgaatgaagggtaggagtagaacaattgtgttctgttgtgacactggtattggttgaggattgaaaagaaggtgggaattttctgagttccttagcttttctcgttgatggttgagggaatttggcatctggggtgtttgagttttgtttagaatcatttgggttttggttggtgaagggggggtaaaggtaaaagaagaatggtattgtggagtagggaggaagagaagaaagggattgttgtttggtttggggtggaagttgggggaattctgttgctgctaaattggtctacttaagagtttgcttgaatcattgattttggggctgggtttaaggtttgaaattgctgaaactttgcttagatgaaactttcttcagcgggttttagtcctccaccccaggaaggtatgtgtactcttgtttgcatattcttcttccatttcctctccctttttattctccatttctatttttggggaactagttatttcatcctcagtcctatgggatatgtactcccgtggttttttttttttgaggttgggatgtggaatttgacctcttgtggctacagtttctgttctctctcatgtagctcagagatcagaaaaggaatttggttaaatttgctgagcaccctcctctttcctttgttgttttgagatcttggctctgccataatcattttgtcctctgaggcatttaagggggcagttatgagctttctattgcatattcatgacattgggatggggttttgcaggagaaaagcgagtcctagattcagaactttggcatgcttgtgctggtcctcttgtttctttaccagctgttggaagccgagtggtatactttccacaaggtcacagtgaacaggtaagttagattatagcttccagagagaaatccttgtggtagctatctggattttcttttactatagtatgtgtaaattgtaaagtaataaaacgaatcttcaaatcctggacctgaagatgctgttttggttacttgccttctatattgtgacatgaattggttcttagccatgcctctttggtctctaatgtaagggtgggttacatctacactcttataacaaaaactggctttgttctttcactatgttgacccttgtgtatagcttacctcacttttaagcacaattcattagtcttaaactgttgcagtttaatgaatttgctcttagaagttagaaataaaatatctccacctaccaccctgaaaccagcacctgaactttttacattttataacatatattctttttctgcataagctacatgcatatgcataaggtaatcagcatttttcttcttaggttgctgtgtctaccaacagggaagtggatggccatatacctaactatccaagcttaccaccgcagcttatttgtcaacttcataatgtgactatgcatgtaaggctggtttatttatttattcttttttacaaaaataagcttgtttattttggtttccttctttcaaattctcgcatatgctgatttctgcactctctttttctttaactatttgttcatttcttttggattcaggcagatactgagacagatgaagtgtatgctcagatgaccttgcaacctcttaatcctgtatgattccctttcttaactgataactagttgtttgagttttatgtttatattctaatatcaacttttggctatgcctgtgttttcagcaagagcagaaggaggcataccttccagctgagttgggcaccccaagtaaacagccaacaaactacttctgcaaaattttgacagccagtgacactagcactcatgggggattctctgttcctcgcagggcagctgaaaaagtttttcctccattggtaaagtattgttatattgtcatgctctaaaattttttgacttgttttcattaaatttatgaatttctttaacttcatgattgtgacctacaggacttttcacaacagcctccttgtcaagagttaattgcaagggatttgcatggtaatgagtggaaatttagacatatcttccgtggtgagtcataaagctctttttaattgcaaatgtagtatttgttttttattttttagttaattaatttatttttacttcagtacatttctaactgggtgctgaaaataagttcactttccatttacaatgtttgagtttggtgttttttttctttttttttctgtaggccagcccaaaaggcatctacttacaacaggatggagtgtctttgtgagtgctaaaagacttgttgccggtgattcagtgctgtttatctggtaagtaattttctgctcctctctttccaagtttttcatcgtgtatattgaaattggcctttggcagttatgtgactaactgactgacttgtctccctaaatcaagccatgtgatttttatgtcttttggccattcagaagaatataggggaatgtttttattgacatgtttcatgtattgtaatatttttatcagtttatattttgaggcagggatccatattgggctgctattgaagtatggtcttcctgtttattgtgatttcttgatggttcaggcttcctgtttattttgatgtccagatggttcaggctttatgagagttgttgtttcttatttctcctagctacttgcttttccatatagactttgatgatattatgttgagcatagttactttcattattaattatctaataactggtctaataaaaatgtattttattcaacaggaatgaaaagaatcaattgcttcttggcattcggcgggctaatcgacctcaaccagtgatgccttcatcagtgttgtcaagtgatagcatgcacttggggcttcttgctgctgcagctcatgcagctgcaactaatagtcgttttaccatcttttataacccacggtacaactgcatacattagtatagtttcaagttatatgatatattgcttaaattgacaaccttttttttccaattcagtactagcccatcagaatttgtcataccttttgcaaagtatgttaaagctgtgtatcatactcgagtttcagttggtatgcgcttcagaatgctgtttgaaacagaggaatccagtgtgcgtcggtaggtttttgaaacttgttgaaaatgatagtggaaatgctttcctttatattctggacattttggtaaattgagtctatatgcaatatgattttaaaaaatcaaacatggcttaaatttcaaaattaatataggccatagcctacatctgtagaagaattctgggtttgtgtggaatatgagtgattgctgtgattttcttgtgaggtgcttttaatctcatgttgttatgcatggtatatttggggaccaaacatgctaggaggctaggagccgtggaaaacattaatctggtcattatgcacttgtgtgataaatattaaattaattaatttcattttgtgcttatcttgataaacaaatgcaactttattctaagtgttacaacatgtataatgtttgactctaaaaataagaggatattcatatcttgtgtcccgtggcatatcaaatataggtgcatggcatcataaagtacgattgtttatcagtacttaaattcaatgcaacatatacatttttaattaatttgtcttgacatgttacaaatcaattgcctgagtaccactttgccttttatttattttttaatgatggtctgtaatttgttgcaatgagatgaactggagacattaatttgaatgtattattattctgatcctcaataatgctgtagcatatcaactaatgctcagtcagtttgtagagttggtgatacatgtttgttctgctaatttgtttatgtatatactcatgcagatacatgggcacaataactggcattagtgacttggattctgtccggtggccaaattcacattggcactcagtcaaggtttgtttgtaaacatttatgatatctcattgatgttatataatttatattgaatgttaattgtatcttcagaagtaatattagtaatatctttcttgggaaacattttgtctcattaaggattgaggaaggattttaaaaatggcatttatttgagttgtaggttggctgggatgaatccacagcaggagagaggcaacctcgagtgtctttatgggaaattgagccattaacaacatttccaatgtatccatctccattcccccttaggcttaagagaccatggcctccaggactgtcttcattccatggtatgcttgttaccacacgtgagctgaaaatattcatgagaattcagttttacatttttaagtcaatttcatttatgcatcaatggaaactcattctcattgtctatcccctgtggattgtagcaggcttgaaggatgatgattttggtataaattcttcactaatgtggcttcgagacacagacagaggtcttccatctcttaattttcaggggattggtgctagtccttggatgcagccaaggcttgatccatcaatggtgaattatcaatcagatatgtaccaagctatggctgccgctgcacttcaggatatgtggacttcagatctttccaaacagcatcctacgtcctcgattcaatttcagcaaccgcagaacttccccaacaggacttctgccttaatgcaaactcaaatgttgcagcagtctcaacctcagcaggcttttccagatagtcaagaaaatccacatccatctccatctccatctcaatctcaggctcaaactcaaacaaactttcggcagcatctacagcatcagcacttattcaataatcagaatcagcatcatcttctgcagcggcagcaacaatcgcaattgcaacagcaacaagtggtagatcatcagcagatttcaagtgccgtctctacaatgtctcagtttgtttcagcacctcagtctcaatcactacccatgcaagctatctcttcacttggccatcagcaaagcttttctgattcaaatgggaaccctgtgactactgctattgtttctcccctgcatagtatattgggttcatttccccaggatgacacatctcaccttctcaacctttctagatccacctcttgggttcctgttcaacatttaactgcatggccgccctctaagcgtgttgcggtggaccctctcctttcttctggagcatctcaatgtgttcttcctcaagtggagcagttagggcagccacagagtaccatgggtcaaagtggcattgcattgccaccctttcctggtagggagtgtacaatagaaggaagcaatgatccacaaaatcatcttttgtttggtgtcaatatagagccctcatcactcctaatgcataatgggatgtcaagtcttaagggaattaatggcaacagtgactcacccaccataccttttcaatcgtctaattacctgaacaccacagtacctgattcttcattgaatcctggaatgacacacaatattggtgaatcgggcttcttgcaaactccagaaaatgggggacaaggaaacccatctaacaaaacctttgtgaaggtgagcttatccagtgggagtattctctttcaaattaagcatttttagttttttctcattactatgtcgtgattgattcacaataaaatttgacgtgttcaaaagtcttgcattttcatgtgatgtttttttttaacaggtttacaagtcagggtccttcggaagatccttggacatcactaaattcaccagctaccctgagctacgcagtgagcttgctcgaatgtttggcctggaaggtgagttggaggaccctgtgagatcaggctggcagcttgtattcgttgaccaagagaatgacgttcttctccttggtgatggcccatggccgtaagtattctttgttccttttctttctaaatgaaattccatgccacttcagaataactgggttacatattcttcgttgtgtaccgtgagttcttatccttatggttcacagcttgtatattctggatttcatttctgccaatagtttttgttagagcaaatgaccaattgatcaggcttcttttcttacgtctttcattccatatctttggtgtgacagggaatttgtaaatagtgtagggtgcatcaagatactttcccctcaggaagtgcagcaaatgggtaacaatggtcttgagcttcttaacttggtccccattcagaggctctctaacggcatctgtgacgactatgcaggtcgggaggacccaagaaatttaagcactgggataacaactgtggggtctttaaactactgaatgatgtaacaatcaatactatgaatctctctctctcttgtattattacttctacttctccaccctttgtcaatggtgggaagtattgcttagttgtagttaataggctacttattagccttttgttttttgtctgttttcctgttttttgctgcctaggaccattcataagataaacaatgtaaccatatggcatcttgtcaatgtgctatctacaatatattgattacttaatctgttaggagttcaatgcccgaagagtgaagatagctctctctccctatccatggttatattgttactttattttaagcttggccataagatcattgggggtatgtatttgaccaagagtatacttagcaattgaattcattggtagagtgtctttcatgcatggagataaagttgatgataaaatccaatgggtgttgttcagttaacaactcacaatctccacaacatacactctttggcattggtgagagttttaagtataattaagttgtgattgataattagttttatagtcagtctaaagactcaaagtttgtgaaaatattttgagaaattgttatggagtctaaagttctaattaccgtgttattaaaagaaaaataaagtggatgataatacaagaaaattgcattgtaggacttacttgagctttttgataactaagcattttgggaaagattgatgtgacacctagaacatgatgaggacaccaaaaccatgtgatgtgtctctcttaacataacaggacggtgaacagatcactttgtgcttccattaatgtgaaagtggcctgttttgtattcttcttggttttggccatgcaccttttcactttaacttgtgatggatttgcttcatgaatggcaaagatgaaagatgtacatttgtacatttggatcttgttcattccttcacattctaatactaagtatttggaatcttaaacctaaaagcatccgaattccgtgccacctctaaggtatcctttcttgggaggttgacaatttgtttcttaatgatggtagttggctcatggctggcttcaaaatcacttacgtaactttgagggacaggaacggtgctaattgaaacagctaaggtgaactcaataaaatcttcacctagaaagtatagttttggttatgataatatatcatgttcagattccccaacacaatagcttaactgatatgaggaggcagaagagaaaggtaatatgcacatattgacaccattttgagaaagttgtatgctagttattaaatagtattacatacataataataaatattaaatgtagtggttggttataaacaaacacctaatccctaataatttgttaaaagtgacttggcctgtaaaaaaaaaatgcattgtcgtttattatgcgaggagaaatattaaattcaccttaaaatttaagaagcaattttgtcatccttataatttattatcctttaataacatgtgagagtgttgtacacaaatttaggataaatatttattttcatccttgaatttattaggtgttgatagttaggtccatgaaagatgaaaatttaaaaggttaaatgatcattttcgtccttgaatgtatataacattgacaaatttgtttctaaaagatgaaaattcaaattttaatatccagaaagtaataaaagtgcgacaaatctattcatccgttaacttttatttgctaacgttaatgaaagagctacgtgacacattcaatgacgaatttgtcagcgttctacacatctagagacgaaaatgtctatttatccaaaatataatttaattttcatttttcccttttctaatcattgtaaacataacaaataacaataaacacttaaaaaaataggaaaacaaacataagttagaacaaacacaataataaacataatattgattaataagaattatgtgcctattgttctgaaattttatattgtgacaatattaagtagtgacaaaatcaaattgaatctcaatttaaaaaaaaattaataactatacatttttatttgaatctcaatcatttgtaccaaatattaagttcatcgtggcacacgatcttaaacaaattaaacggctctgaatacttaaaacattcggaataccatgaagacacatttttctcctttctcctgacttgtgtttgtggtaggaagcatataaaaataatccagacatgctgctattttttttttgataaaaaactcaattgcggcacatagaatcctctccgacagtactgtttggcaaacatctttggtttcgaatctcactcgaaaatcaattatggtaagtagacttcatttagagaaaagcgaaaatattacacatctatattcacactaaaaaataaaaactgattctactttattactaaaattaaccttttaactcgtttttaaaacgtcctttctgaagaatacaaaccatggccatttttataattttaattcttttaacattaattctttcatattctattgaattataaaacaagcgcactctaaacgaacgaactaattagtttaatttgtaaagttggaaaagttatagttggatcgcatggcaataatagttatcaggatggcgttagcaattattcctggggtcacatataaagaaaaaatatccgagtgaaacacaaaaaagaaataattatagataaataattaaattttaaaagatgatgtaagcaaaatgttgttttattaaaaaaaagaaaatcataataattttttcctacaagaatacttttttaggaggtacgaagataatgctatcccaatatttttgaatacaacgatctatcttttcgtttcttagaataagtcataataaaggaaaatgtttttcatacaatagaaatggaataactattgtattttttgttattttaaggaaatatttataaagcttgttgttgcgtcaaaaacttgacgtgtaactcacgataagtgtgtactaatgttcaagtagtaacatgataaatagagtatcgttttcacgatgattgagacactaattttattgtaattattatttttaaattggaaagaataaaaataaagtaatttgtgatttgtgttgtgaattgaaggaattaaaataatagaattaaattacaattaaaagtaaagataagattgatgatgatttcagaatttatgaagaagaattgtggtgaaagcgcaatcacctctattccctactcatgtaattgaatggataattaatcgctttcagaaactaaaaccccaatatctctattgtgaattctagccctgagaactcttaatagattgataagtctatcaatgacaatcagaattaaataacaagataaagtgaaacaattataaaaagcttcattaatatcaattcaatccacacaagagttcacattgacttatggcctcaccacaatcaaagaagaattagccagacatagttatgtctgactcaatacaatgatgataaagaagatgagaaaaaaatacaaagaaaaagagtaatcaaacccctcgatcctgaccttcttcttgatcttcctaatttcttgatttccttcaatgcctcctttttatgtttttgcctgtgtttctgtgtgtttcctattactttcctatttatagtcaagtttgtaaaatcctaatatcttttattcttatcctatctgtaagctgattttgaatttccagaattgcttggctctttattttgtttcttttcttctatttcctgctcttagacattaaaataacaataattaataataaaattaatgataaaacaatttatatctattttaagtctttatttgatattttatgtttaatttcttaattattttatcctaaaaactacatttgctagcatcatatcacttgtacattaaaaaaaaagaaaaaaaagtgaaaaaaaaacaataactatatacagtttaaaaacctaccaattactttatgtttaaaaaattataaaacgcatgtattcgatcttatgattcattttatcaatttaaactgttaatagtagttaacagtaatcagtcgtagaaagtaaattataattttagataaactttagttatgatattatgattcggttacggaaagtatgacgactctaaaacactcttatactaaaaatatagccagtcaaaaagctcaaatctaggatttttgtcctgcatgagaactagctaaggcaaacaaggtgtccttttaagctgtggcactatagctatcgatgcactgggattgggtggataaagttggacttgtgagtgttggtttaattgagcaatttttagatgcatgttgtggggttgcctaatttatgacctttttttttctgggtatggaatggtgacaaggtaagacactatccaccataataataccaatgagaataggtagggttggcaatccaacaaccctagcccacctttattgttgatcataacttacactctatcttaaatctcacgactttcttatctctctcttccatttttcttgagtactctagtttatggcatttctccatcacccacgacatgatcaaaaaggttgtagcaaactggcaaccttgtataagaagtgcatggatgtgtcgttagttgtttccaccataattgatttataataatatacagcgagggtacgtatcaaattactctcttggtaaaattattctctttcaaaactttagttacatatttaattttcttgatccaatgttaaatttatagttttggttaagtgatcaagtctaggaatttttatacatttttaaaattatttgatacttcgctaaataaatttaatttaacatgcaatatatttttaaaaaatatataagtaaatattgactataagattatgtaactataaaagtctgattatctaaataaaaattagttttcataaaatcacgatcattaaattatcaatatcaaaatatttaattaaaatttaatatattatataactgtacatgtttgatttatctaaaatttagtgtgtatgattgttgaattaatatcaaaatattcaatacttagattaataaattttaatgaatacaaagagtaattgaagtgagtaattttattaaaaaaatattcttagactaaattaaccccttctcatcatatatgtacatataaactttttttattatgagaaatgaaaactaaatatttgagtcatgtaattatatacaaataatgaagcttaaaacttaataaaagtcacatgaccactcttaaaaaaagtcatgtacattttttcttaatcttaatcattcaattataatctaatgatctgtatttgtagtactcatttctcacattaaaataaaataattttgatttgaaatttaaggattttgattattttacacacctttatctgagatggtcactactagaaaataagcttttaacatcgccctcttaacatcggttatgaagaaaaccgatgttacaaaatacgcgatggcatttttgtaaataaaatgccatcgttaacatcggttttttctaaaaccgatgttaacataacaattttaacatcggttattttaaaaccgatgttggctaagcaatcaagatgattataacatcggttatttaaaagaccgatgttgtctaaacacttacaacatcggttatttaaaaaccaaaataaccgatgttgtctaaatactcacaacaccggtttttaaaaagaaccgacgttgttgttattattcacgcgtgcgcttttagagtactgccctcaccttttgtcttcccgaacattcactcactttcttattgttaagtttttcctcctctctctctgctcccccatttctatttttccattcatcatcatgtatgttttctctcttggtttttctctttatttatttttccactttcatttttttattttccaattttgtggatttattannnnnnnnnnagtttgcgtcttttgctcttcgaatctggttttgccttttggaagtaaaggatgcatttttttccttttaaggttgagttgtttattagagtttggatatttgtatttggccttttggaagtaaaagatacatcttatttatttaggtttgttttaagtttcaatgtaggtctgtgcccacgtccaaactgaaggtgcaatggtgcttttagaagatcctaaaatttggtgggttcatgtgcgaggaagccatctatattctggtactgattgnnnnnnnnnncctccgtcagccacagaatcgccgcaaactctcttcgatctcttcaccttcctcttgaatccactgatgcccctctatgcgttgtcgctacttcctctcaccaaacccttcactctctcgccgtcaatcatagatctctctggtgttttgagttcgagaaggtgtgacttgataatttctactcgtgtttgttggtgacgtcgagcgtgtggagcatcattggaaacagcacagcctctgcgatgacaatctcgaagggctttcattggaacagaattctgtagtttgcgtcttttgctcttcgaatctggttttgccttttggaagtaaaggatgcatttttttccttttaaggttgagttgtttattagagtttggatatttgtatttggccttttggaagtaaaagatacatcttatttatttaggtttgttttaagtttcaatgtaggtctgtgcccacgtccaaactgaaggtgcaatggtgcttttagaagatcctaaaatttggtgggttcatgtgcgaggaagccatctatattctggtactgattgcgttattttaacttgttgtgctttgttcatttgctttcatctagatgaaggatggaaaggatggtgctagttcgatgggttcttgaaagacgttattcagatggtgaagcctgcgaagggtactaatactcttgcttttatatttaaggagggtgttatggtagctgctgattctcgagctagcatgggaggatacatatgtcagtgtttgttagattttaatttcatttttcattgttttttgttcctttggctgaggcagagtttttctttttttgtgctaattgctgcaaattaaatgatgggttttatctatttacattgtgtttgatcttgaattctgactgttggccttctccagcatcgcagtctgtgaagaaaattatcgaaatcaatccatatatgcttgggacaatggttggtggtgctgctgattgtcagttttggcacaggaatcttgggattaaggtaatatatgcaaccttgaacctacagtctcctgccaaattgctgcgatagtctcccacaccttgtcattccttgcaattattattattgaatattgatgttgttttagttgagttggtaagatttacctctttgaagtacatttatactcattgcctaaaaattatttgtccataggcaacatcttagcctgtgttttggaagcaaataaggagtgaaagagagtgaatggaatggaaattgaactatgggagagtagtctggtgtcttgtttggattgccatgtaaatggtgggaatgaaaatgataaggaaaataattatgttttgcttgggaaaaatgaaataagttgtgaagaagactatgataattaaaatccagatatatcctttatttaagatgaatttgttgagaaggatggttatgcaattcagaatttcagatataatctctttcccatgtataaagtgtggagaattttacatctaattttcatttacttagtattctttctacctatatccaattaattttttctaatttataatataaccttccattatttttccattgataacatctagattggtgctaggaatgccatttaattgccatttgttgttggataggttgcttttgaatgtactaggtttcattctgtcatttttattctacctggtataagcattccagattatggatacgtagtttgggtcatagtgtcgtttgcatgaattggcaaataaaaggagaatttcagttacaggagcctcaaagctacttgccaatattttatagtcttatcgtggaatggggttatctgttggtaccatgattgttggatgggatgaaacggtaattcacacgacaaagtgctaaacaactttttctcagctagtgcaattcttacttacaacatttaatctcttttttagggccctggtctatattatgttgatagtgaaggaggaagactcaaaggcactagattcttggttggatctggttcaccatatgcttatggtgtatgggacagcgggttagttaaactttttaaattgccacaatttcagtccactgttgtttggtttaaatattgaaagtggcttcttttgctaggtcttttgtcacttaaatcaatttatagccccatggttaggtgcctcataccttgtgttagtgctgcattgcttgatcaatattttcccttttattggctaaaccctgacgtgaaagttggttggcttagatgataatatactataaaatgtgctgcttaaaatagagtaatatatgcttacaataaattaattatttaatatgcttaaataatgaaataaatttattattattattcggtnnnnnnnnnnnnnnnnnnnnnnnnnnnnnnnnnnnnnnnnnnnnnnnnnnnnnnnnnnnnnnnnnnnnnnnnnnnnnnnnnnnnnnnnnnnnnnnnnnnnnnnnnnnnnnnnnnnnnnnnnnnnnnnnnnnnnnnnnnnnnnnnnnnnnnnnnnnnnnnnnnnnnnnnnnnnnnnnnnnnnnnnnnnnnnnnnnnnnnnnnnnnnnnnnnnnnnnnnnnnnnnnnnnnnnnnnnnnnnnnnnnnnnnnnnttattattattcggtaatatacattagtattccaaaatgtttccattcttttttctatattagataggtttcaatgtttataatgtcatttaaaaatttattcaataataattcttggtaattttttttttttacatttagattcatggtcaaatatttgttttgaacgaattcaattatatttaatttttgaagaaaaaaaatctgattattaagtgtatttgacatcaaatttatctttattaattggcaattataaaattaaaaatttaaaatttgttgtaataaattgaacttaataaattttcatattatctatacttagatattttttattgttatatataactgaaaccaaattaaatttttactttttctttaattctaatatgtactaattattagatttaaaatgaatttaaattttatattacacacacacgtttaaactttaaagtattattatgattttttaaaatatttttatgaaaatagactagtataaaaaagaatacaatttaaaatctaattggtttgaaataaaaaaagacaatttatgtctttgttgaatcaaacaatcgagtgagattataaaataaataaaattaaaattggtactttaggcctagtaaatatttggcttaagctttataggcagtattatggtcgtggagcttagcctccacacacacacacacaagtggataccaatccagctctacctatggaattatttgagcaatgtaagcctcttgacatagtttttcttaaactattgatgtagtgaaaaagtactatacagtgtacatttgatttagccatgagattcttgtgagacggttcagtagaaatggttaggttttaaatattatttacatgtaaaataaattttaaatttagaacagtggaagtgaaagatggaggaaaatggttaggttttttttttttcatttttaatactctatatttatacccttttcaatgctccataacgaagaaatggcttccattcattatcagtnnnnnnnnnnaatgaaattcacatgtcatttataaagtatattatatttattatgttctcatcttccacacattgaagttgtatacattgagatcatggggttatagagtatgactgggagtaataaagagaataggtctttttttttaaaaatgacattttaaatcggttatttaataaacaatgtagaaagggaaaatataacatcggtttctaggaaaaaatcgatgtaaaaaaggaactttctacatcggttcttccaagaaccgatgtaaaattacacacaacaacatcgatttttacaaaaaccgatgttgatatgtaaattcaacatcggtttttatgaaaaaccgatgttgttatgtaaatttaacatcggtttttataaaaaaccgatgttgaatttgcatagtttatatttttttcgttaatttcttattatttgacatcggttttttaagaaaaccgatgttgtatagttatgttaacatcggttttcaagaaccgatgttaacgttgatattttcaacatcgctggtttcaacatcggttaaaaaccgatgttaaatgtccaatataaccgatgtggaaagcgatttttctagtagtgggtggggaattatagcacaacattacttaaggacgcatagttaaactttttaccgggggttactggaacatggtcagggtcattaaaggtgttgaatgacattttggtatgcagttatttggtctatatggtcgggctataactgtttgatttttacaacaaatattacagatgaggaataacgtctaattgaaaacatcaaaatgtatttttttttttgaaatggaaccaggttaaaagagcttcacttttcctctttcgggttggatgatgaacgccgtgttgtgtttacagtaaggtcaactaaggtttttccttatgtctattaatagaaaattaattgatattaaatatatatatatatatatatatttagggacacataacagtcactaattgaataaattaaacggtaaggattgcatctatgaaattttaaaaattcatgtcacccaacaacccatgtattcttatatatgagtgtgcaataagttactaacagtaattataaaagaattagaaattaaaattttctcttaaaaaattctttactaattcattattaatgttttctctcttcttattctcttatttctcttattttttaagacttgaagtgaattgcataatggataacatatgatatatcaaattactcagtcgctttgttttcaaagttgataacatatttctttccttattccctttatctatcaacattaatttttcatttataacaagaaataattgctcagaatccctttgtttccattcttttatgttctttgcttttcattgactaaatgaattaaatgttataggtgacaataaaaaaggttagccgacatatttgaagagccttaagttgaaaagttaaaatggcttgagaagtgaagcgaaactgcaacaaataacatacaaatcatttgtcacagtttctattcgctttgcgtaagacatatgttaactttcaacttaacactcttcatatatgaattaaatgttaacttcctttgttggcttaccttttttgatgtattcaaaatttgccacttgaacgtttaattcatttattaaatgaaaagtaaagatcatgaaagaatcggaacaaagcgaatctaagcaattgtttattgttataaaagaaaaacttatgttgataaataaaaggaagaaggaagacaataacggagattgaattcacataactttttccttaagcccaaagtatgtaatagtgcaatcaagaacaatgttgcaccaagaaataatttcgatgtcataggaattcttcctccattgttgttcacaataaaccgaacaaacatgtgtcatgcaaatggtgaatagacgaaaaataaagaagaaaaggctgagcgaaaaaaaaaaaataggaagatggtgaacaaatgaaaaagaaagaagagaacatgagaaaaacatactgagaatttttttttcaaatgaaaaagaaagaggaaaagattgtgaggaaaaaaaaatgcagagcgatggtggacaaatgaaaaagaaagatgttgcgtgatcatgtgatgcacgtatagaggatggggctatttattttattgccaagacgtatcctctgaatgtgatggcggcgtcactttatttacacttttcaattgtaaccttacatttagggttttacatattaaattggtagggcctctaaggtcattttattttattttttattttgagctcctaagcttgttattgtaaccttgcaattccatgtttcacttgagaacattgaccatggtaatattagatgaaaaatgactttctatcactaattcatacctaatcattatgttaaaataaaatgttatatatatatatatatgatttttttataatattttgtttaagatttgtcagtttatatttatttttttaagaaaatgtataaacagattcatgtagtttaacttgtgatccatcatttactatcctaactcctaatggcatctttaatcggagatgcttcatggatttcttagcctaaggaacgattttttttagttcttcgacattggaataagtgatgtggtaaaactaatttcttcaacgaacgataaattccttatataaagaatcatttcttaccaataaaaaaatattattttcataaaatccgtactcctcaaccacaagaacaaaaaaagtgatgaaccaaagaaagaagatgaacaattttaacaaaacaaattaaacagatgaagcaaagaaagaagatgaacagttccaacaaatcaaattaaacaaatgaacaaatgcatagatgaagtttcacaataaaaaattacaatttttccaaacaaatcaaatcacccaatgcaatatcaactcagaataaaatacaaaccaaattaaagagtaccaacactgatcgtgaacagagtatgaatagtaaccgtgactccaacgacatcgttctgaccaacttcgaacatcgtgggttgcgtatgtcaggtcatgggttgggtggtgttgcacatgactagtgttagggtctaggttgggtggtggcgtgattaggggacgtgacagtgttggaggacgaggtggattggctcaataagaggtttgaggaaaatgaagagatgatagggtggggtgacactagaagtttgaggacagggtgggtagggatggttctggagcaaagagagaaagagacaaaaggtcgatgcatataggtgggaagggtttggagaaatagtttttctaagaaagaaaagagaacgagtagtggagaatgatataaaacatttatcacaattgtgattagagagagttggagatattaaagttgtgagacaatttgtttatcgttacatactattcactttaaattttggatcttgttgatgtagttttgcacataatatttctacttttattttttctcttatttttattaagtctcatttttttttattctctttaaaatggaccctagttagtatttttaattaatatttaaaattctcttcaattatttatatttattatttgcatacataaaaattgaaaaataaacaaattattttatttgaataataattaaattataataaaaatataaatgtgtgaattttttgaaatttcttctgatttcttaacattgaagtaaaattttgtatgaatttcttagtaggtatcacaaaaaatattacaaagatcataaaaacataattaaaaaatccatcaaggttagaaatactctaagttccaatcggactcgtcaaccaatctagttctaataatactggatcttcctattagtcctccattgacaaatagcaacgctgcgaggaacataattttattttttgtataaaaagaatacgtttaattcaaaaaagaaggaaatcagtttcacatttgggccattggaagagggccacgatattttgggctcaggggcccaacccaaaccgggtacccgattgatagactagggtttatgtcagagaaattgggacaccatcgtctacatattgaagaggcgcccaagcaagttagttctttagccgtcttcgctcacaactcgcaaaccacaatggtaactgctatttcgttttctacgtctttgatttgatttatacgatgtttatttgttcgtgtcgaatacgatgtttatttgttcgtgtcgaatacgatgaataatgttctgagttttgtgtgtttgtgcacgacacaatacagcctaagcagatccacgagattaaggatttccttctgacggcgcggaggaaggatgcgaggtcggtgaaaatcaagaggagcagggatgtcgttaagtttaaggttcgatgctccaagtacttgtacacgctttgtgtctttgaccctgagaaagccgataaattgaagcaatctcttcctcccggttagttattattactgttccttttaacactatcgtatctatatgtatctgggattatgaatttgtgttatgggatgcatgccatttgttgtttgcaggtttgagtgttcaagacctgtagaggtgctgagtgcggcagcgtgtgtttgtttatctttttgttacctgatgctctagattttgtggcttgcttttatattttggtaattgttatgaggctatgcttattttccatttgccatgaaaatgtgaaagttttattttgagcacaatttaattgaattacccataattttgtggtttattttatttattatgattgagtactgtggttagccctttgcctagaacaagaggatttcaaatcggcaatttggcttaaagagtcattcaattttattgttctagcgatactaactaggttcgactcgcatggaattgtataatgttgcgcataattttcagtctgtggccgagtgaatgcttctataaatccaattgtgcccgaaacggctatatgtttaactgctgaaattccactactgcacgaactcaatatcgcgtgttggggttagttttatggtaaaattttaatgttaaaggtatagccacaagtcgttctatattttcatggtatcaccatgatttcatggtacccataaactctttgcatcaaagaaatccagacttggtcatcactgctgtaaaaatgtaggcacagtcttctcgtaccttattctcatttaaacacgtgtagcataaattctcgtattataacaattgcgtagctaactcaatacctcagctcgatactttttcgctagtaagctactcaactcattggggaggtgtcgacatctaacaatcttttttacttaggtagagttgtttctgctagctgagtttgatattggtgatttggtaattttagtctttcttgagtttatgttaatttgattagctgccacaattcaaattgtgttatgtaattgggagcgatttcattactgttgttggttgatccgatttcattagataacaaaggaagctgcccttagatatgagagaatttaagagtaaatattctgctaagtcaagcaaccaaatgatatatctcgatgttagttttactagctcgatcaattcatggtcaagttagatcaataatagttctaaattgctcatcgtagtgtatgttaaattgatcctcattttgaaattttaacatgaccttgattcgtgaaacctattcctatctctctttttctaccgcttcgattaaactgtgtgaaccaaaccctccggtttctcttatcaattaagtcatgctggaaaaaaaattgaatatatggtgaatgtaagttgttaggatcataaataagttccagaaaaggaggggggatctaactcacttgttttttattcctacaaataaaaaaaaaggcttaattatatatttaatttattaattataatttaaagtttaatttagttcttgatttattaaaatgtttaattaggttccttaattatttaaaatacaataattaaccctttccatccaatgataattgatcatgttaagtggtgatttataacccctggtttaattattataattctaagataatcataaaattatccccaaatcaatttcaattataacaatatccaccccaaatcaacacaatcaaaatcctcccatcccaaattaacacaatcataacctaataacccccaaatcagcataattagaacacaattagaataaaaattgaaaaaaaaataaaatagatatagatttggcccatggtatgttcctcgttgatggatgctcgtcgttgtcatctctaacgttgaagctctgactctgagcgctgcctctcttgtcgatgttttcactatcagagccgctttcggatttgggtgcgaaggttgtggtgttgtgggggttgcaatgcacaggcaatgcttgtcatgggtggatgtggaggttagtgggtaacgtgggtggtggggtggaggttggtgatgtcgtaggtggcaatgtgcagttggtggtgggtgccgatcaatttgagttcatggaggttggtggtggcttgttgtgtggcatagttagaggaaggggttgcaggttggtgcaaatatgatgtttgagaaaggaaggattagaggaatagttagagaaagggaaggaagaggatgctagtcaatttcattagtcaatgtgataaaattgatggaaagggtataattgttgtgttttcaataattaagggacttgattgaacatttaataattgagagattaaattgaacttaaattataattaagagactaaatgtataattaaatcatgaactgcgttgattagaaaattattaaatgatgtgttgattgacaattattaactctacactttaccttaaagtgtaccttactctagaagagtcagtcctctcgtgaatctttgattaaatgtgcatatttggttttactttttttaagaaataattaaatttaatggattttaagagacttttaaaaataataatttctcaaccactttatcatgcactaaaattatacaatgcgatcatagtcattgttgtggttcaattgttcaaaccaaactcatggtagatccgaaatcatgccactttacgaaattgatctggtcaagtttatgaacttgataatttgacaatgatttttaaccactaaattggccctgaatcgatgaaactagaccgatttattacataaacggtttgggttaatttaagaaaaagaaaagtcccaatctagctgattggagactaaactaagtatcgaggattcaataaacatgcatcaagttatttgtttatttggaatggcgttaggaatatcttctatttgacaacaagaaactctaattctttttatacaaaagaatcaccaaaatagatagtctctctcccaataaaatattttcttataccaaaccgggatcaaatctcacttagcagcttaagaaacattcatataccaactatgggggatgagatctaaaccaattgagagtctcacctctcaatgttcaaggaatagttcaacatacatttggtttagaaagacatcaagtgcttacgaagaactgtctctagtaatagtataaggctctatatgttctattcgtaatttccactacaactatatgctccgcgaaaagatgctagaaatgcataaacaccgattcaattgcataagtatggtatgaattacccaccttgtgtgtttcaagtaggggcgtcaacatatgcttgctatgagctacaacattcatcatgttaaggtggattgtgaaggtgggggatttaattttgcggttttgtgtgttccaattatcgaatacactattctaaatcatttgcgagttattgttgtatctttggagcttatcttaattccattatatgctccttaacggcattgccccatttttctaccgtagcatcatttgttgttttaatcatatctagtgagaattggatttaccaagtttctcatagatgacgccaatgattagtataagatggacaaagttgatatattagagatggactgctactttgtccaagatagaattgaagggatttaactcagttggttaagtaaaatgattgataaaatatatttgtgtatagggtttagagatgagcttaattctctgacagtgtccaaggcttctcttggacaataacacccctatattggtgtagaaatagagcaactatacttctgagatgagatatgattcgccgttcattagtgcatgttaagattcttgtttttggattgagtctaagcccagtgcataacatgaacagtacatgtaccgtattaataggtttgacttttaaaaattgcccataattgttgaaagtgtttagaaccggaatgtaacttaaagaaagggactcgtttattgtaagagcaaattaagatgaaataaagtaaaattatataagttaacttataaaaattatgaaacaccttcagacgtgctatttctgttcactaggatccaaatgtgtttttgttttttctgttaatgtgaatccaaatatattttggagcattgcagatgttgctatgtagaactgaacccaatgccctacaccataggcgattccctgagtttttcatgcagttcttagccaattcaaagtccaaacctagtgagcatgtgattgtggtcccccaattctttctccacttgggcaagttataggaggcaacttcacttttacagccttgtggaaacttgtgtcatgctcaataccaaactcagcccaagacatgcaattggcccattacattcgtttcatgtggtggctagtgaaaggtcgaatcaataaaaggaaaaaaaatgagcatgtaacaaacttgtgtacatcttttttcaatccatgcctattttattcatggcttgttctttttaaatatttaaggtctccctctaaatgttgtcagagtcatgaaagtggagcgcaatggcaagttctttatgggattttaaagagccgaaagcaaaatggacgtacatatttgtatatgacaccaatgaatattaaacacaagtcggagattttggaagctttaaactagcagaaattggccagtacttatttattgcgtgttatcatttatgaaaagtagtttttgtttatttatttatgtatttattcatcttaatatatagtgtggtttgtacaaatttgacagctattgtgatagcctacttttattttattttcatatgagacatagcctactttattgcttgtagcatgttgcaagcaaccaattcacatttaaactcttagttgcatttcataataaagctcacaaaagggtcaaaacatgcttttgaatatcacagaaaaagaacgaacaagcttttactggtccaagtctaactttggtaaaagaatttttttgtaatggaacacaataaagtcactgaatcatttattgggcgctaaaaaaagcttattttctttacaatgctttaatagtcaaatttaatcctctagaaagcatgtcaataaatgaatgtttgttatgtttctcatagcaacaatattcaaagtatatggtgtgatagataccaaactctggatcttgttgagattttcatacaagtttgcaactctttaataaaggaatagaatttgtataaaaaaataagataaactgaaagcaagatcacaagaaaatttacattagagtaaaataaaaaaggccaggtacatcacaacaaacatttctctctcttttttttgttttttgaagaaaaaagacagttttgtgacatgtaaacattactcagcaatcaatttaatgtagcactcaggtgtttgaaaattacaaggtttcagtaaagtataagatgatataccagttttaatgacccatatcatccacggtaagaaagataagcaatcttgtagtaaggtgcattttcttctaaaagcagtgtttaaggtatatatcacagccaaccacagcaaatgtaattggaagagggcaatcgtcctgtttggcgaatgtattctgtttgagccgcagttctttctgcttctcgattttttctagcttccgctgctgcacgtttttcttctgatctttgcctcgccatagcaatctttttcaccatttttgcatgtgtctgagctctcatttgctcaactttggcctaaaatgcatatagtttcaatcaaaggcaaggtagtagtaaagactttaactaaagtatttctaaagttatattgcaattagataatggccaagcatttcatacaatatattcaagtggacacgagtaataatcataacaaaatttatcatgcctttctctccccttccctctccatacacttggtttaaaatcctttctaaattgtgatctcttcaaactacgtttaggtttcaacttttgaacatgcaataacttggtttccaatgaatacagctatgtaaacaaataactacctcaattcttctcatttctgcttctaattttgccttttgttgactttcccatgcttgaattttgatttcctcacgcttaaatctgcaaattttaacacaaacacattagcaagaatgaacaaattacatggtctataactactttccaaaaaaaaaaaaaaatcatgatttacattagtctagagaatgtgagtaaaaataaaaccttgcagtatgtttagatttctcagcttcctcccacagagccgcacgtttttcaaattcaattctctgctgttcatgcacattcgcctcctgaggagaagatttgttcttttcctgctcatctttgcttgcccaggcagcaatattcatcttaccaagctgcaccccaagggctgcaatctctctccttgtcttgatcttcatttcttcttcagacaaattcctttttccattttcaactggaaactgggaatccccatctgtcgtgttgtccaaaggtgtcggtgcaggtgcacctctcctaggagtcgacggcattgaggaaactgggctccgtagtggtgtcgcagatccaacaggagtagcagtccgcgaaggttcttgacttggcacaggggtcatttcagttcccatgtctctcatggcaacagatcttatcccaggcatcactgtatcatgaaaacaagctaatctacattgagcatgtcaccaatggatgtaataagaacatgcaccaggatattaactttcaatgttttagtgttccattcctttttttttatcaccatgtgtatattttttcaattaaaataagaaaatgcataaaagattaatttcaatagacaacaagtgtgtataaaaaatttcagctagcgataactggcttatattttctattctccagttatgcaatgaagtaaaggttgccttaaattagcacgaataataattatacaaatgctttgtatactttttaatcttcccaaaagaggatataaaaaaacctatatcatcaattttgagggttgaataacatacatgactgatcatctgtacttcttgagcaagataaacctaattcattgacttcctttagatctttgctttggggaagagactccactaccggatttcttccgtgtgcttgacctgaaaccgaatgagcatcggagggaacaaaagagaatttctcaaatcccatatgtgatgttggctgacagaaatcaactcgctttgtttctgtcactttgcctgttggttgtttatgatcataattaccagattctggagcaaccctccccatatttgttggcatgcgatttgcttggttatgtgcagtattcttttttgagtgattcgcctgtatgttttgcctattcattatccatttctcggcatcgttccacttagaaggaataggtctgaatagggatctagtagcaggattgttccctggtctctcccctttatcaaactcaaagctggacgagctagcattgctgtcataatcaagattttcatcttctattgcccttcccgcatgaattgcacttgaacttccggggtcaaccttcggaaaatggtgcatctttgcacgcctggtgtcgccattttccttaggcattgtctcctttggttcataagaaatctggtcattctgtttccggtccagcacggcattactagatggctttaatgacagaacatccaagctcggagatgtaactggaaggaacaagtttccaattagtcaacatatgaagcattttattcaatagaaaaataaatacacaaaagctgggataaatactgactaacacaataacaaatgtacatgaaaaattgataaattgcaattgcaaaccttcatcatcaaggttgtcatttttggagtcaagtaagctattcacaaattcagtatcctcaatccttgagggggaggttctggatgagttactgttggatccatctttcttcctatgatggtgaggtcctaataacttcatccttagtttactgggagaaattattccagcctgcagaaaaaatggcatacttaccctcatcaaaatcctagaagaactcaattagaaaatttctaacagaatccatgtagcagtacactgcataaacaattatacccaatacatgaccactttcttcttttccaccaaaaggcccaccccaccgtttcaacccacaccctttattcactcagaagaaaaataagggaaaatgaatcctaccctttttttttcctttcccttttcagcctttttttccctctcttcctcacccacccacccaccaaataataatgacaaaccccatccttccattcattacaaaagtagaaaaagcaaaagcatgatttttgaaaccatgtcaaaattcactcggaaagaatcaatgaaacaaagcccacaaagaaactgaagggatgatgactattctgaactccatgaacacaaagcttgaataatatggaccatttagccaccaacccagtttaagaaacaaaataaagatttaattttgatgaaaaaaaaaactatgaggttgaatggaagaggagaggagaaaagagatggcaacagtgggctaaatgccaaacctgaactttctctatcctctcgtactccatttgatctctgactctcttctttctctctaagttggaaggtagctgatgcagaagtggaaggaagaaaagttgaattttacagcttggcttggaagtagttatgactggtgagttgtgactgtgaatgagagatagtaacaataagacatgagagagaaagagtgagattatgaatgaatgtgatgcagcaaggacaagagcaggaacaggtgtttgcttgctcaagaaagtgttcaagttgggttcctctacagtacaggagatgctgtatctatctatcatctcgccacgccattgcaacatctcattatcaattttttttttttttttttggtacgcacctcgtgtatttttataggagcccatctgtccatgatcgtgaattcatgtcgtgggttataacttataatttttttttaaaaaaaataaatttatgtttcttttctaattcacatttgtttagaaagataattatgtttcaaataaatttttaaatcaaatataagaaaaggatatacgaaattcaaacctgtaatcttttaaatgtgagtctctattttactgtactcggtgaatccgaactattacactgttttctacttttacttttacttatgccttctccccttccacccaaggatnaaaaaaaaaaaaaaaagaagaagccatatttatttattttactttgcagtttacatggatgccctgaccctgaccttacagataaccaacatacgtaacgacgtcaattgaatttgatgagtttatatttatgcttcaatggagaatttaaaatattttaagagattaaaaatgtaagaaattaacttgttatgttcaattctttctatgttgtttttaattctaactgttattgaataattaaatttctaatataattttttgtgtgtacataaaaatatttatagtaaatagttaacaattagtaatatctgttgaaataaatagattatcaaaataaataccgtctcctcctccaaaatatttctcattttttttgtaaaacaaaaatataaaaaggataagaataggagcataacaaattgagtaaaactgactgataattaataagtattgcataatcatttaaccaatttttctatgaacattttttaaattttgaagaagaaaaaacctttatcttttccttcaattcttttgtctgcgtgtcaattagtaaagcttcatggatttatatttgttttttcattgtaacttttgttttaagacaaagagcagattactcagtaactttaggacagtcttcgagatcgaaacagtgggcatgatcagaattcagaagtttgcattatcaattttctctgtatagtaactgtttatgcttgtaggtcatagactcatagttcatcaaacgcgaaaaactactacataaggaaaagtaataaattagaaaggaatttatttttaatgaggtgtaagtatacggattcaagttgggatactaaaatgtgacgtgatagaatatatattattaaatgatagatttagatggtatatgtttttttctaagtaaaattttagatttaaatattgagtacataaaaagtttcattgagagaactaatctcaacatattaaaaatattttaaatttaaacaaaatagtgtcctttaaccaccaaacacttaattatttagtgcgaaatcattctaatttaaccaaaggccttagatgaaannnnnnnnnnnnnnnngtattgtgttaaatagtaatacttaaagaaaatttttattacccgtaatgaaaatgcatgtgttctaaaaaaaaatccagtactttgtagaaaatatatactaatgatctaaatataaaaaatgcacaaaatctgttgaagtttgtacatgaaatcataatttattagttctacccaaaatcataaatgattggataaaattctccaatacaaaaacaaacttaccccttaaccttgttgagttttttttatatatataagagacctgttgagcgtttatactggaatttacaaaaagaatcannnnnnnnnngtccatgaaatatttctctttcattttattataaaacgtaattttgtgtgtgttataaataaattatacgagcatgaatcaatttactccaaaagtaactttaaaatacataaatttctttatatttcttttttttaattataagtttttttatacaacaaactaagaaacatagaaaagagtaatggtgaaagttggagtaatttgcacaagatcttctattcaaacctagcttatcagtgtcattgtacacaaaaaaagaaaattaggaaatagaatatgcaaacatacttcgatggaggggaacaaaaaaaaaacaaaacttgtcttattgtcaaatctaaataaataacttaaaggacggattttaaaagaatgaaataaaaagnnnnnnnnnnatatccatctatataaaaattaacaatctctagaaattttgaattattgtaaaccaaactcaactaagtagaacgatatgtattatctaagtttcattgcccaaactaacgactttttttgtaagtatacttatatatattgtttttgtgtatcgtcaaggattacaattttgaagctttagtactccaaaattatttttttgcaggatatatatgggatatttatgtgttcaattcttcaaggacaaattttatatgcacttttcattacatttttaaaattgcatgctgataactatttacttctccagggacaactttttatatgtcctcttgatcagttattcgcctttaaattttcaatttgagttttatatttaatttttatgtgcatatgttcgttagtaatgttactttttattactggaagatgattaatacataccggaaaatttgatagattaaaattttaatttatttttcaacgatgatatataactatccatttattttaaacattttattaatatctttcatttttttttctttctcttcttnnnnnnnnnnatactggaatttacaaaaagaatcatataagggatatatatatatatatatatatatatatgagagatgcattttgttttttgaaagcgaagatatgcacattaagtatatgttttagataattattttattaaaaatagtcgttttaaatgtaaaataattctaagctcaaataatattagatgtatacatctggattttttttatagaaacggaaagttaatttcaatttatgcccaaattatatattttgcaagcaacattttttacgtaactaacataagttcacatgttataaaaaaaaattaagtccacaacaacactcaaaatgtaaaatgaagttatgaaatttagtattatggttctatatcaacaccttattattcatataaatcgaagcatatatcataatattttttttataagctaaagaattcattactaaaaacaattaaattgtgcacaagatatgtccaactcaaggtgccaaaatgatatagttagagaaaaaagaaacaagtactgggatagtgtcattgttttggacaaaaatccaaaagacccaccccaattgaaaactaaaattaacgaaaaatcatgcattggtagttactagttaacgtgaacttattgccaaaaggaatatatatttgcgagtctgcagtgaattacacacatttttctacttgtaagatctgagtttaattgttattgatactagtaataaatttagatttgggaattatttaaaaatttacatttgctaaaaaatattagtcggtgttcaaagttcaaatcaaacagaacaaaacacgtgaaataaagcctctcatcaaacccgtggatgcggacattggtagctaactaattattccgataatttcggctccgaatacctttcttattcttagttggaaaaaaaaaaattattaacaacttttgaaagaaaatacaataaagacaacgtggtttgaattgaattcctcgaggaggagctaacatatattgggacacttatgattggatagaaaatattactagtacctcgtttcttcttaagcattattttaagggtttcaactttttatgtataaattaaaaaatatactactttatgtccttactaaaggttcaatcaactaattaatcaaaattaaagaaattaataaatttaatttataatattaaatttatcttgaattgatacttttttcttcaaaactactcatattaataaaattaacaagcatccataaattataattttctcgctgtcacattattctatgattgactctaattaaatatgtttttattaaaactaactaatgcaaaatatattttagactgaattacacttttaatttgatccttataacaagaacaagaaagaataatatttatccttagtaaaatatagtagttaagaagttatttattttatcttttttttacatcacagtaaataaatatcatttgctttttttaatctcaattccataataaatgagtaaattaatcaaaattaattaaaaataattaatattatcttaaaaatgaaaataataaataaataaataaggagaaacaattattttcaatggtatattaaaagtttaaaaaataatgatataaataatgatattttttaaaataaaaaaaataatttaaatgtcattatttaatttaaaatttaaacaaatcatctgaattnnnnnnnnnnaatttaataaactaattttttgattttcaaatatcaacttctaatttttcaacttccaaataatttttcaagaaaggatgaaagaaaaaaaaaacactcatgtaatatgttggaattgattgtacaacatatttgattaaaacctctttcccaacttttgaaagattctcggaagaccaatgattaattcttctccaaaatctctctttggtgaaagtaaaaatctctttcttcctcctaccaatgataaaaggaagtttaaggtatttgcctttgtcaacggtttcagttacacccgaaattgaagagatgttgtatattcagatgggggtgtgtttttgctaaagaaaatcttcaaatttatggtaattgatgagttgaacatacatagcgtcatatgtatcaagaatcttcctaaggaaatttgtctcattattttatgtcttgcaaactaaaaaataatcattaccaaataaaatgtgtgagaattgaaattttcgtactcactatcacatcatagatctgtaacacttttttaaaaggaggtcctgtaatgtgtgaaatactaaaaacacattttctaatatattttttgattttttcttttattaattgaaatttattaaaaatgataaaaaaaattggtatcacattaattttttattctaattttataaatgtcaataaattttaatcaacaaaaaatatatttaataaatatattagaaagtatcttacgaatatttcctttgaactcatattaagaaaaaattattttatatcttaaacttaaatataataaatttaactaatttcattcttatttaatgatatcattattaaaatatcattcatttaattataactttattttatttatgatattaaattttaataaagaatattttcaaaataattttattgttaatcgatattaataaaattaaataatttcagtcaagagtatgaaaatatttttccttatatttttgttatatacgaatccattcatcttggaaaatactacaagtaaatgaatggtaatagtagtagatgacaaagaagccatgaatatattccttggtcggtcaaagatacttctgtgaacacatccacaaacgcaggctcatactttaagattttaattaatttatttgagagaggggaatatgaattaaattaattagggtgtcagaacacagaagccgaaggagatcagagttcggaattctataatgtaacttctcctatcactgtttctatttgaccacagtcgccactttccaccctatcaattccacacgcccacaccatttcaattttcaaaaactcacgtttttgctatgatgctaaatttctagaaattcatgctacttatcaaacaatacaaaataccaactaattactttagtttctatcttttattttctaagaattaaataaaatatataatttcatctttttaagaattattttaaaatgtctttgacattaatgcttttcttacaaaacatccttaattataagtcatccttttgggatcaataaattataagtaaaatatattattttaaactcttaaagaacattttgaaaacttaatttaattttcttctcccttttttgtgtgaatatttccctttccccgaatccattaatcatatattatgcttaaaacttgattttcaaatgcattttctcattaacattctaaaataactaagtgtcttgtgtaacaaatattgtttcaacactgttaaaacactatttgaatttttttatttaattagtttatatataaaacaagtattgaatgcatgagttaactaatataaaattaattgtttcatcttaatcaaatatcttaaatttgagtctttagaatgtaattacattaaacatttaaagagaatttttttcacccataataatcctatccaagttaaatatgattatttctaataaaaaatacttattctattaaaaaaaagtttttgtataaaacacttgaagaagttttggtataaaacactagttcaatataatatcatgtatcttgcatttgtttcacttacctgatcgaaactactgtgtactaaatcaaaaatttcatttaccgaactttgttgttccatctttactaaaactaatctctatttgatactactcttggaagctttggtcttttgagtctgccaaacactgttttaatcagcaaaaaatatatgtatatatagagaacacaaatgggtacccaaaccattttcaagattggtatgcacacagcatattgacttgccaaacactttctaaacaaccttccaagcaccgactcaattcttaactaaagaatcaactcaagggtttatagttttcaggttgaaaattttgtaaagattgcaattcaaatcatctctttgttttgttgtgtcattaatgtgacctacaactctatgaataattcaatccaaactaggctagtttaatttccatttaactcagcgtttattcacaagttggtgtgtatttttcaggagattctcctttctctttgaagattaaaaaagcagtagacagacgatatcacgatcataaaaaagttcaatatcaaagtggtaaaacatgtgaattaaagtggttgaaagattttatcttgttgatctattcaaatattcaaaagtcatacaattttattgtcataatgaaagcagtattgcaaatagcaaagaacatagtatttcatgagtggatgaaattaacataacgaacgacattcttcatgcaacttatattccttcgatctcatactcaattagttgatgtcttctgcaagaccttagacaaatagtttgactacttttttattttttgcaagttgggaattctaaattccagtacactactttgtatttagttgatgcagttttagaagtttgagactgatcgagcttttttatatatatccatctatataaaaattaacaatctctagaaattttgaattattgtaaaccaaactcaactaagtagaacgatatgtattatctaagtttcattgcccaaactaacgactttttttgtaagtatacttatatatattgtttttgtgtatcgtcaaggattacaattttgaagctttagtactccaaaattatttttttgcaggatatatatgggatatttatgtgttcaattcttcaaggacaaattttatatgcacttttcattacatttttaaaattgcatgctgataactatttacttnnnnnnnnnnnnnnnnnnnnnnnnnnnnnnnnaatttaataaactaattttttgattttcaaatatcaacttctaatttttcaacttccaaataatttttcaagaaaggatgaaagaaaaaaaaaacactcatgtaatatgttggaattgattgtacaacatatttgattaaaacctctttcccaacttttgaaagattctcggaagaccaatgattaattcttctccaaaatctctctttggtgaaagtaaaaatctctttcttcctcctaccaatgataaaaggaagtttaaggtatttgcctttgtcaacggtttcagttacacccgaaattgaagagatgttgtatatnnnnnnnnnnnnnnnnnnnnnnnnnnnnnnnnnnnnnnnnnnnnnnnnnnnnnnnnnnnnnnnnnnnnnnnnnnnnnnnnnnnnnnnnnnnnnnnnnnnnnnnnnnnnnnnnnnnnnnnnnnnnnnnnnnnnnnnnnnnnnnnnnnnnnnnnnnnnnnnnnnnnnnnnnnnnnnnnnnnnnnnnnnnnnnnnnnnnnnnnnnnnnnnnnnnnnnnnnnnnnnnnnnnnnnnnnnnnnnnnnnnnnntgtcaaatctaaataaataacttaaaggacggattttaaaagaatgaaataaaaagcaaattagaattttaaatgaatatatataaagaagcataaatataatttgagagtttttatggtattcttaattattttggaggttttgatactgttaattttttaatcaattaaattatatgtcatcttcttattaatgatttttttttgttttttcannnnnnnnnnnnnnnnnnnnnnnnnnnnnnnnnnnnnnnnnnnnnnnnnnnnnnnnnnnnnnnnnnnnnnnnnnnnnnnnnnnnnnnnnnnnnnnnnnnnnnnnnnnnnnnnnnnnnnnnnnnnnnnnnnnnnnnnnntgctctctttctacactatgttaatcataaataaaatggtttcaaagtcattgtcaggatgtttttttatatatcataacaaattagaaaaatagtgacttttgtcctccctattaatgtaattaacgcggagtcaattatgtataaattaataaaaacatctttaaggttaaagaaaagaataaagaagagtactcatctaaatattctggccttatattttacaaaaaaaaaagtttttttataataaaaaatattgaaagtaactaaagagattttaaagttcaaacttctaaaattatctttaatcatattttttaattttaaaagttacaatttaaaaattttaaaaagataataatcaaagattaatttgaaaaataaaaaataattaataaaaaaatgacatataattttattgattaaaaaattaacagtatcaaaatcctcaaaattattttcagcagcgtagaaactcatataattttatctttctaaaatgtctttgagatcttatttcaaattgtcgataagccgtaacttcctttgactaattaagtccttttatgacgtacatgcacgagaaacactttgtagtcaactaaggatgagaagtagatatataagtccttttatgacgtacatgcacgatccaaattaattttagctatcattaaatgaatttagaaaacggatcaagttagtaaatggcaggctttgttagaactaaaataatgatatattgcttgtatataggtagggaaaaaaaaggcccgaataaaaaaaagatagaagagtagatatgtaattgaaggaaatattaatattcctttatatcaatgaataactctaaaattatgttttgaaaaataattggtttgtataaatgcatcccaattatgataaatatatttcataaaatctgaaacacagtaataaattgtggttatgcactaaaagtaataacattaatttttttacaaatactctatctatatttttaaggttctgataacatttgattaagaaaaaactgattttgcctataaaaaaaactgattgatatggtgaagagtattaataatattaactagtacttttttcacaatttattattttaatttattgattaggaaaactgattacaccttttttatcccttaattccccacttctattcttcggctcattaattaagatgtcatttggaaacgtagccaatgaataattgaatagtactcctcgttcttttaactgtatttgcaaatataattaacttcccatatcgggctaagaaaacataattagcattccgggatcttaaataaaaattttaaaagctcaaaacccaatgggaaaagtagggaggtcgtactacactttttgtttgcttttcattatatggtcctataaaatccttctatttaagttacattacactttttattatttactcgtattaggagctcaagaaacattcttttattattgttaatttcatcaattcattaaccaaaagttgatgaaagattagggaattccggtcatagacgcctattacttcacacttcacatggtgtgttctcattttgtgtggggcccattctcctttgaagattttgggtatgacgtgtatgcccttcaaaggggctttgaccaatttgtcttattttcattcgttttggtatgtgaactcattgattcgcctacatgtttgaccactttccatttccacatatgcattcacgtattgatcgaaacgactccatactagtgttttatatatttttctgctcattttttgtgtgaaacatattgggaataacagaggtcgggatgaagtgaaaaacatctctttcaccttttttaaagaataattgttataacttgttgttaatattgacatttttccatcgtcgaaacaatgatctttttgaggaagtattgaaaaataatattttaatatattattttgattaagtgttaaaatatatttttttggttaattataaggtgacgcaagaaatgaagatttagaaaatatcaagatattaaaagatatcaatggttgagattaaatatataagttatctaggatgaagattgaagaccaaatcatccatagtaaaaagtgaagacaaaatcatcaattatgaagatcaaagaccaaaattattgacgatgaagatttagtgaaaatttataaaagttagagatagttataatttgtactttataaaagtataacttttatgttgtaataaaggagattgatacataatcacttaattcctcaaaatatcaacacatttaccatcgaaattggcaaaagttcaacaagttatcgtatatttattcaactctccacttttatgaatcttcacatttctaaatcttaactttttcaatctccatttattctcaaaactttatttttccaatccttatttcttcttattattgaaatttcttagaaactaagtactgaatcaaaaatacttttataaaaaattattctattatctgatgattacaactttattataactaaaatgaatatgtttatcaaaattattatcttaatttacattaaatattaaataattttttattaagttgaaaactatgaatttacttgttaacaaaaaagaactcataatcaaaaataaattttatgtttcacttttaagtatttatttgttaagagaattattcagtgagaatttctttactatcttaaaaaatattttccttttgaggaatagatataattttgacgattaacacttgtttaaaaaaagaattttagattgcaatatttttaaaaattgaaaaaatgtatgccacttgtttnnnnnnnnnnnnnnnnnnnnnnnnnnnnnnnnnnnnnnnnnnnnnnnnnnnnnnnnnnnntttatacttttatcgcataagtatatccttgtaaagttttgtaagctaatgcagttgacctttattgacttgttgaatggaataaaatacatagatgaaaaggatgatagatttttcaaaactagagaaatatgcagaaaaagaaaagaataaatgtaaaaaaaataacccacaatgaaaaataaaacaaccaatatattagatgtatcctttaaaatgtaaaatagaaaattaaaatttaaagataaaaaaatctcacaaattattatgaaaactttattttatgtttgactcatactgtataaaaagacaaaaaatattttatgaatttcaaaaaataaaaaaataactttaaatttagaaaaaaaaactaaactttaacaaattaaaaacatatttaaatctatttttatcatcatattatcctttgtctttctcattgaagaacacttcacttacaagtgacatcccaactacgaacattattgttttcgttgttttttttagaccaaattctttttttgaaagcacaaaggcttgacataaaactctagtcagagtgtgtgttgactaaattttgtaaaattaatttacttacatgattttataataatttatgttttaaaaacattaatatttttattaaaattacattggattggaaacaaattgaataaattttaatgcattccaccatgacatcaaacaacacttatattccaaactaagcgacaaaaagtacaattagtcatatttattccatctttaatgataactctatcttagagataaaagcaaacactacatattagcagactttttaatggctttatgaggacaatgaccaatgatagtatcaaagcaaaaattaaacaagagaggtaatgagtagaaaaaacacgagtgggtggcatctactgaaagttttatttgtgtggtggtcgccattctagcatgcagatagaaatggttccacttccagctcctagtagaaacaaaagtacccctttagttctagggtctcattatcccatccttaaggataggatacacatgcatttaattaatgctaaactaaatcacttatcttataattgacgatttatttaactactaaagaaaatagtttaattaattaagacttttactaataaaacgtgtaagacattcgataatcaggaaaaactaaagagtatttctttttatatatattaaatactttatttttgtttaatatttaatattttcaattgtttaacaagtttctttaattttaattttgatggcattgattaaaagtaccaaaattcttacaagtaggttagaatctcccgtacccagtattcagcttggactgtacttgctttgatgtgaattattgagtatctttccaaatactgtgtatcttatcgtgaagcaatgtaaacttgtcagcactatcatataaccaaggcaagtcgttttctcacattagattcaggcacatggtctgggcattgcgttgattgtggttagtttgcagaacgtaccaaaaccaaaactattgttttctctctctattttctaggttaatttataattactaactatatttaattctccaatctccatggcattattccatggcattattctaatggcacaagtaaatactcaatttgatctttattttttttatataaaaattcattaagtttctgataaaaaaaatcaccagacaatttcttaagattataaatgttaggcattctagccttctatttattagataaaagaactaaaatatataatgtttataattttgaaaaactaaatactcagttttcttagggatcaaaatattgtcattattattttaggaatcagtttgagtattcacctaaaattatataaacggaacttggatcagtttgaaaaaaaaaattaatctgagtattctcatgcttaaaaattattgactattacaaattataaatgagactcgtcaactaagaagtaacacctataaattaaatttgtgtgatgtccaataaatttaagtcaataatagcaagtgtgttcaaaatagattgttagaaaatatattcctaacatttattttacatttaattgtgataatatttaataataccaattcatctaattataaatttaaacaaatctaattaataaaataaaattttaaattaaaataaaattacaccttcataaactatgataatattaaatgtcttaattcatttattaataaagtctttaagatgttaacttcaagggtctagttgagtcaaacaaaacctcacttgtatctttgagatgatgtatatgtaagtatatataatacttttataagcactcaaaaattttcttgtgttcaactaatgcgttatcctcttccctgttcttagtgaaaaaaagatcttttatattgttgctttcaacttttccttgggatgaaattcgatattcaagaagtcacccctctagcttggaattatcaatattaagcaaaggaaataaatgaagaatatacaccatccactgtgtggtgcgaataaattggtgtgagaatattttaactcaaataattgtttcgaattcgagtctgaggtgttaaatattgaatgagaaaacttttccaccaatagttgtgctacattgctactcaatttaaacaggattagttcctcatccctacaaatgatatatatgatctataaaaaaaataagattggactgcatcatttgatggctagaatttacatttgtgtgtgattataagttgctttagtgtgtatttgtgtaactttagtatcagaagttgactttgattaactttcatagatgcatttgagcttaactaagatggatatatagtgaattgggctcacacccaatccgtaacaaatgtcatgcacacgagtcattgttataatatacaagcagtcaagcacaattatgaagtaaacctatgcaatgtgggtgcctacaattagtaaatatggcaaaaactcttgacatatattatatatgtggctatgcattgagaattatctagttcaagcagatgagtattgaacgttatagcgtctaggtggattgaaccttggatagtactcaacccaaagttgttgctaaccttgttgaatgttattgatatttgagctccttgaagattgagcttacattctttaactttaacatattcaattatcatagttaattaagttaaggtgaacaatggataaataacacgtctaaaaaacaaaaaaaaaagtaatttaaataaattatcattgtaaattttcttacaaaataaactaattagaatcaattttacatataactattaaaataattattataaaattaataattttaccatatataacattccataaatgaacggaaatcttacattgaatatgtaattctaatcaaattcaaaacgaaatatcatactatttgctgaacaaaaaaaataaaaaaaaatcatactatttgcttaagtagctggtggcatattgctgtcaaaattaatacccacaaaaagaaagaattcatgtgggatctctgcgggaataaatttcacaagacagaatactaagtttgttgggaccctaatgaactttgactgggaaaaagggattgcagctttctgattttgtgaccctttgattgctatctttgaaaaatctataaaatattcaaatataggtgtggaaagtcgcttcctcatgctttaactaatttcccttttgtcaagcaatgagaattttggcttggcttggctttaaagtcaatgatggtttacaacttttggaagcatttaacgctatggtaaatccaaacacttttccagagaaattttaaaaaagaatcatcataaggatatggcccgactatatttaatggaaataaagtttacttctaaagagaatgaagaccaacgctaccaactaaaaggtgcccttcaaagtgtggcatttgattataatgcttcaaggaatcaaagtagccatggctcaaaatgattgaaaagatcattgtttactttaaataatgtgttctataagcttcaaatgtgtatctaaaattagattttagtataaactcgataaaggctaaaatcttttcttttaatgggagatatacttcttttaactttatttatccgaaaagaaacttttcttaaaaaaaaaaagaatttcaatgaagcacaatgacgttcaacgcatttaatttaccctaagtttctaataacattaggcttgcttctgctgtttacttagattggacgtatgtgtagtgcttcctttgcaaatgttctttggggggccatgggtcgagatgtaacctgtaattaaagaagaatgtttcttgagcacaaatttaagacaacaatttctttaaatttggagtgtgtttttaaaatgcataaagtcaaagaaaataaaatccaagaggtagaaataattatgtatatagtcttatatatggtgtttacattttatgttttaataataaaattggtgattaaatttattaattgtcactgacccaacgacaacagaaaaaaacacaattttccattcaaatgtgtcacaatgttatatatactgtttaaggcagcccacgctaatatctagcccagcagtgtatgcgtagcccaaacgaccatcgcgaccacacacttgtgtcgttgtatattcatgatcgggattgctattctcaccttccatcatttcctcacaccgcctcccttggcaaagtgggacagcttaccaaaaacaagtcaggctggtcctagctcacaaaaaatggggtgggccaagctggttcactttgcaaaattggctagcaatgctatccgactccacttttttagtgagctatatgggttgacctgtcagaccatgctcattttgccattcctaatttaagttaggaatgacaaagtggaccagtccaccaaaaatagaccgaactggccttagcaaaagaaaatgagatgagtcaaacgagcacactttgtaacgtagtcattacaagcccgtcccacttttttcaatggactagcccgtcagaccaaacccatcttatcatcattactcctcgtccctctctttcctcaaccaccaaatgcttcatgtatttattttattttatttttttaatttaaattttattaaaattttgtgtatatatattttaatttaaattatttaaaatcatttgatatatatatatatatatatatatatatatattaatttatgtgtttcttatttaaattttgaagattttatatttgtcaattttttattaatatagattttttagttaattttattaaaaaataatattttcttaatttatatttcattaatttaaatttataatgttttatatatatgattttttattttttaatatgataatgaaatttaattttttaatgttcatatttattaaaaattcaaaaatctaaaaatgtaaattaatctactaaaaaaattcaaaatagaatattattaaaaaaatatagtagaaacagtgtacaaagtctaaaatggtacaagaaagttgaaaggcatgttgaatgttgagttatgacaatggatatttctaaaatgaaaatgtaattgtaccctttacaataaaaagacatctcttttctctgatatattgcataaatgaatctgtcattctttaagaaaataataagtaatatctgcatctactcattgtgttgttctatctgtattatgatcttttttcttcttctattgttcacatacgtagatagatagctaaaatcagaatagccaaatgatatgggcaatatagaccacctttgcctagtgagctaaactctactctattgaatttcaaaatctatgatttggtggtcctaggtttaaattcttcatgcttcttcaaacccaattgaaaaggtttttctggcttaagaaacaagattgaaccataatttcatgcaatatttttcttattagtttccaatacttatggttttgtttcaccaaaaagattttgcatcccttttgaggggttgttgggaatatttttaaaataaaatatagaaatagtaagaacttgcagaaaaaatagagattaataatgaagaaaaatagtcaataatattgataaggtaagattgtttatatatagcttacaaccaaaaattctaaacagcctagtttatcttctatcatatttatttttaactaattaactgaaacaaaatataaaagataagatctgcaataataacaaaatcaatacctaaaatttattctaaatttaaaataagttaggcaatatctcgtactctagcactcctccattagatttgtcatgaaaatcctaatttttaactccaaagcttcaaacttattttagaagtgcattaaatctatttaatttaattccttccggcttcaaagtcttcaaacaccgtataacaggatttgtcatctcaaattcatcttgcagaaacttttactacttcaaattaatttgactaaatctttcatgccaaacatcaatttcatcaattttgaccacaaaatcatgatcttcaattaaattaaattcccaataaaactatttatttccaatcatttcaatttttacaatctctgtgtggatttgaggcatatgatagttttaaaggtgaaccttcagctaaaggatgaggactttgtttaccccatggacacttccaaaagtccccctcagtgtgcttgtgcccaataatattgttaaaaatgattgaaaaattgcaactcataactcggatctacctaaactgggagatggaatgagtatgctagatcattccatagagaactgggacgcagaaagctggaatataatcccaacaaggactggtgcaagttacttaaatgatatacttgcttttcgggataagagtgaagaagagaagggtaaacctttatcagaacgtagcagttataaattttggcatggttggaacttgacgttaattccttggccgtacaaaatctaccacgaatgtacaaagtccatttgtcccttgctgcataagtaccattcagtgtagtgtgtctctatgtagttatgaaggttttgctatgacatttaataacattctacatgtttagatatagttataaaacaaattgatttgtgtctgtctcttgtagcttttgtgttttattgcttgctaagctaaatgattttctagtagttatttccataaaggaaatcattgtttattgatcttattgtgaacttatgtgcgtttttatttccgtgaagaatgaatgaacatttgtttcttttgacgagttctaatcaatttatgctgataggaaggatttgatgacactcacatttagcgattccaacggcgacggtagcctaacacgtcgcgctcgacattggtaaatgccagattcggttatccaaattaaacgttaagcaaatttgcttccttattttggttgcttgatacttggttattttgatgacttgtccttcgtctttgtctacaaaatttagaaatgatttggtgtctgtaagtatgtttaaattatgtgtcaaatcttataaaaaattcacacaaacacacatacacctaagtgttaaaaataattttaaattagcttaaaattatataaatatgatatatcttaataagaattctcaatttagcaataaattttgtaaaataattatcaaatgaaattttatcaatcagtgtagaaattcttgactgacagtggggtaagacaacttttctaattttttattagcttataatatataatactaaataaaatatttaataaaatgcacatataatcactactagcaaagatggtcatacacaccatggattaacacttttaccaatttaatgaccagtccaatttaaaaacattaacaccatcaattgttttaataaaaaaatacaactgaaatactcggaaaaactagtgataaacaataagacaaaacttaaaaaagaaagaaagaaaatggtaatgctttaatttaattactaaacaaactgcaaaaaaagaaatgcttttgttcccgcactttacacttaaaattgacttttcatggttcttttaatcctcacccttggcctgaccccatccactataaaatttcagtatttaggcgagccaaatagaaaaattcaagacatgtaacgagatttagagtagaagataacagaaaatgttagatgtaacaaaacagagttcactgtcagcttctgaattaggtcacatatttccagaaaaaaaaaattcattctagtatcttatcgcttgcaaacagaaggatcattatggcttgtctctgccctgcttttctgaaagagttaaatatggataaaatttggttttagtgcaatttaagttaccaatatgtatatttactactacacatttctcatgttcttgattttgggataaaataatccagattaaccaacgaaaaaaaaagatttaatattctagcaaaagttaaaaaaaggattagcagttatttttggttaagatttcaatatctttcaacttatttttacaaaaaaaaaaaatatcaatgtacaaatcttttgcaacacatgtttagttctcattagtgcataagttgtccttgttcatcttctaacatccgattaggagaaccatagggaagattcaccacactgtcaccactaacataaactactcgaaaaatatcatacttcatctcagtggagaatcgttcaagatatggcatcatccactttctatggtctgagttgagaatccatgagtaacaaaattgtagggactgccacacatgaatgcataccactcttggtaagcattggcctttcatgcaaaggcccgcagttatgccttctgttttgggaaaacgagacctaaatattgctaggactgcatagcacaagtcattaaggtccttagtagttgtgattactgagttcatggagattatgtcaccagtgctgaactttacatttaaagatccatctcttgattctccagcatatgcatcaaggaaattgtgttcaaccaagactgccattctagttacattattggttagcattgattgctgtaaaggaaaaattgcaaaattgaataaataaataaataaataaataaataatcagggcatagcatgttgttggagataccgcattaactagtatatagacaaaaaattaataagagacaattcctactccaggagctagtttttagagttgagttatgctcaaatctaaattctaagatatatgataaactaatcagattacagaaattaaactatggatctagtctgcccaagtactaatatatcttcatttttaaaataataattctcacgtgaatatttaaaggtgaagatcaatgcacattgcaatcatgaaacatttacttactccagctactttataagtttgagatattctgtcatatcaggaaagtagaaaactagagctggcttctaacatgaaatgttaaattatttttttatgaagagggttagtttttcttggcatgcctcttatgcatggcataatgtctataaagacatgccagtcaaattctagatttcttgtcccgcaaataatatttatttagttggaatttgaagacatggatgtgaatgagcctttggcgcttcatgatcatgcatagtaaaactttttcttcatctacattttattccagaattcttcctcatgaagagggtgtgtccatgttaattaacgggggtaatgtggaatttcatgtaataatactttcctaactactctttgaaaatgtccaggtttgggaaatcagtacataatgtgattaatatcatcaatttgctacaacagcataaaccacataaggctttctctccagatgttggtgtttgtgttatagtttagaagcagctagtcaacagatcgattttgcattatgctttgtgattctgctagacagctgcagatacagttttttagatgacttggtgagcattgttttgtatttcatttctcttctaataattccttcttttatcgaaacacacacacacacacacacaattgtagttcacatataatttttgctcacataaaggattcatcagaattgtcttgtttttgtatatagatgtctaaattttattaaattgctgtcctattgaagtacttcaaagtctatttcagtgcttcagaaaagagaaccaataaagcagtccaatagttagggatcaaacttacaagatttgctgtcagcttatctttttcatcattagatcgtttctgccatgctccataccatatgatctgattacaggacatgatttttttttttaacacaaagtgcaaaaaagaaaatagtgaagcaatatatgctcagtgggggaaaaagaactagcactaacacgtaccaacatatgttccatgtaacagagtaattttcagtgacacatttcattaaaaaaagaagagtagccagctcattaatgcacctgaactgaataatgttaatgatctgaaaaactcaagtgggttggtcgtcttggttccaagaaaaaatttcagctaaataatattaggaattagaatttgtgtttctaattttaggaaaatgctcactgtagattagccacatgataaactactttaacacattaactacgagttgatgacatatttaaccatcactgatgctagactatcacggaggtatgaaacaaagaaattctcatctacaaaatattagaaatattacaaaaggaaattatgtggaataggaaaaagaaagctaaaagcaacaattgatgctatatattttgtccttatgttgtgtctactttgaagccagtcatatctaaaaatcattactaattttggtgcaatcttcccgttatggctatcccagtcaaacaatacttgcattacaatttaacagaagaaaaaagggatttcataagtttatcagcaaaatttcaagcatctaaaaggaaaagaaagaacatactcttgagaattgagattagagataatttaagagaaaattttcaaaactaaatgacaaaatttaaaattagagaaaggaaagaagaacttaccatatttccatgtatgctcctaaatatagagctttgtacacaaccaagattctgagtgagtaaggaaaactgttgcagtccatgaacaagatggtcgacaattactacagttggcttgaaaacatagaagcttatttccaaatctttgttgttaaaatccagagagcatgtcatccttttctttatgactctaaattctcttctgcactacaaacactatttatgttttatttgaaaggctacaaatactgttctgtctgtgaaatttgtcaaacacgagtcgtgaagcacaacacacgcattctcaaaacttaatcaatgccaaggttgcttcctagaatttgttccaaatattgaatttcggtgtagagcagttcagttggctatttcgttttgctttgccagaaactaccaaatatatttaaatataaggtgacttggaacttggaattatacattcacatgtgtttgacttattcaagatgcttactttattgtaccaaaacacagatttttatctctaacttgtagaattttttaagattgtgtctttaatgagagtttaacttttatttaagaatggcttatgaaataaaagaataaaaaaattaattcaagttcgaatctttactgcacaattacgtcaaatatttgaaaaaataattttattatttaaattaaaatagtttgactaactcaaataagattatctctttcttagaaaatgtaccatttttttttattgtattaaatagaatttggttagtgtgcatcaatggtattcctcacttcacagtaaatactaattcctattgagttagagaaataattgaaatgaggaccatctttctcaataaataatgtataggttttattttttattctttaataagtggtccatttataataactaatgctaaacatatggcaatatataatttatagatagtaaaaaatattttaaaataccaacaaatttaaattatatctttctaactttcaacttgaaaaatgatcctttttaatatctgaaaagctcgagtcaagatgttaatcaagtgataaaattaataaatgaccaaaatttatatttatgacaaataattatttcgactcggtaactggtggtttttttttttttttnnnnnnnnnnaagaataaaaaaattaattcaagttcgaatctttactgcacaattacgtcaaatatttgaaaaaataattttattatttaaattaaaatagtttgactaactcaaataagattatctctttcttagaaaatgtaccatttttttttattgtattaaatagaatttggttagtgtgcatcaatggtattcctcacttcacagtaaatactaattcctattgagttagagaaataattgaaatgaggaccatctttctcaataaataatgtataggttttattttttattctttaataagtggtccatttataataactaatgctaaacatatggcaatatataatttatagatagtaaaaaatattttaaaataccaacaaatttaaattatatctttctaactttcaacttgaaaaatgatcctttttaatatctgaaaagctcgagtcaagatgttaatcaagtgataaaattaataaatgaccaaaatttatatttatgacaaataattatttcgactcggtaactggtggttttttttttttttttnatctgaaaagctcgagtcaagatgttaatcaagtcataaaattaataaatgaccaataatttatatttatgacaaataattatttcgactcggtaactggtggttttttattattttttggtagttgaaaataaaatatttagtcttttttttttttttttgaacgaatatgtaccttttgacacgttcaggtctacgtgaaatgttcatgctttaactataaacacatataaggcaaccacttaattaaatgctggtgtgggtcaaatcgaacttgaatgcgtattgtcttttcggttttgagtgagagcgagcgagacaaggtcacaaagaaaaacatattttaatatttcattaaaaaaacaaatttaatatttcataaaacttattaaataaaaaattaaatacatttacatttaaaaaaataacaatttaatattaccttaaattattgaaagggagacacaagccgaaattcgaagactacgttcacgagttgctgttcattgtagacccacaccagttcctcacgtgtaaacgttatggaggcgttaatacttaatataataggtcacacgcatgccatccaaaatcagtcaacacgcctaatagaccacaaatatcttggccactagattttaatgttgattaaattagtttttttcttttaattttttttagatttgatttattattctaatttttaaaattaattcaatatatattacagtctatattaaattaacatgtcaagaaaacgtattttgtaacaaattaaaattaaaactaccactaaatacttttaaattacctcaaaacatatatttcctaaaactgttaatttaatttagaaaataagagcaaattaaatcaatttttaaaattagaagactaaattgaatctaaaaacaaattaaaagaccaaattaaatataaacaataaattaaaggaaaaaaactaatttaatctttaatatttttagcctcataacttttccacctaggttatgtttaaacgttttacagaatggaatggacgaatgtaattaacaactaattgtctttctccatcttgattaagaacgggaaagaattttatacgtagatcttcaatataattttcaagaatttttattttatactatataacaaaattatagggtgaaataataattgaagtttttaaaatgaaatcaaaatcattcttcctcgttacacttattaaggcgaataaaattgcgagtttggcaaatagttatccacacagtaccttcacatgacattatgaccccattccaccacaaaaattaacaatgaaattgaaatacctccccaactagattggagttttttcctttctcctcaactatattaaattgctgtctaatttgttttcagcatcgggttgtagattacttcttcgtatacaacttcaaaaagtttaattagaaaaatagggaatccaccacaacaggaaatcatcctttctcttacatagaactaaaaatgtcttaatttttgggtaaaaatatggattcatcagattgttgtaggatcaaatgataatcttaaaaaattatttcagtgttctccaacctaaccaagatcaacagtatggtaatattctcacgctcattaccctgcaaggacacgagaatcaatttttcattgaaatacaaacatgatccacaggaaaaggtattgggggacgagacaaagtatcacatgtctatggccaagtatgacttaaggtgaccttgtttaaggagatcaggaaaatagtttgaagaaaaagaaaacaaaaatagaaggtaacaatattcagaaatgtgataatttaggaaatgcaccctcgaagaagggtgagacctcaaacgcaatgcatgatactgatcatagtgaagagttcatagtctgtatgtgctacttttgatgagactcagattcaggtccatgagtattaccttactataagtttatgggcactctcaaaccatcgtgagcaagctgcaccaatagtccttccctaagcacaattatagaagaataaactccgtaatttgctaaaatccataacataccactgagtacaagcaacaaaggtaaatacttgaacaacattcacatagtgtaccttctggaccagtccattaaaaactcattgtccttgtggtgatcaaactcgtgagtcattccaatcaatagggtttgctttggacataacctcttcacagtttcaagagcctaaattacaaccaatgagactttgccatcagagacataacaagcctgaacataattttgtaaaaagcagaactaacctgtggaagacaaaagtgaacattatgcgatccagtctgtggtaacataaagaggaatatcaagaacactactatctttgagaaaataaagaaataagaaaactaaaaaatggaattgagaaatatgtattagaaaaggcaagaggcagaatagtcaatcaaatatgaaccttaaaaaatgtcaaaatgaagtcaaccatatgcttttgagaaaatttcagaaaataagagctgactaagaaccactttcagtgactgccagccggcaatattctatgctaggagagagttagaggaactgataaattgataaccagactgaatgaaataatacaacatagtggagtcactttaaaaaaaataatctatctgagatatttctacgtgagtgtaagtgcattgtcctttacacatgagaatagccttattcacttagtggcatataccacgcagactgagtgaccaacaacagttgaaaatgaagcactgacctttttcagcgtatccaatataagaagatccaactgtccagccccacttttcgaaatgactgtagaaaataggacattttgcctgtcagaaagccattctctgtagggttttataatgatgtataaattcttcaaaaacttctcattatgcaaactgccttcctatgaggaagacaaggctattcaaggtattcagcagttcaatggctttgtttatggttaagtaaatagtgcttactgcttcttcttgatgacataacatccatgagacattgaggttactttttcaggtctgaaaactaaattttagctgatatttgccgagttgaataaatcaatatcaaaatactttctttacagtttacagagtaacttgttagttatttttttataaccttgtggttaacatcacactttctctcttaacttactagttggtagtcactagcatgagatgagagataattgaaaaacaaaaccctcccaattgtgactctctcacttaacacttgacataaaagagatggataacatattagcattgggtataaaaggtagaagtagttggtgatggtcttaactcttaactatagagaacaaagttccacaatgaaggatagctgaagcctcctcatcaaagaattgcagggtaatactcatcataagaaatttggaatctttatattaggacataagtatagttgcttgtgccataaactatgcagttatgtctatcttttatttacaaaaaagacataacaatgtgacatgctgcacacaacatcaaaagatagatagaaaagttttaaattctaatttcaaactaattaactaagacatatacttattgcacatgaataactttaaagtttggttaaagagaagaaaagaaataaatttttctctgtttttatagaaaaatgagaggaaagaaaatgctattgtataaaataacctatatacccttattataatataaaggaaaagaaatgtgtattaatactccttttgccaaattctctccaatcaaatgaagtttacgagttaccactgatgaagtaacacacatgtttaagtaggaagaaatgacttcaaaactcaccatactctgtactagctggaatccgtgaaacatcagatatataagccaccctatttttctcaccaaaaaggaaacccaaacagatataatcctctccatgcattacctacatacaaaaatgtagcgcttaattccttataatgtctaaaaggggtattgcattcctaccatcaatgacaaggtttgcggtgattaactggcaaaggaataaattttaagcctgacgcagaaaatggctgattacaatcatcagcaattatgttccagcaacactgagctacccttcgtatttcttgcccttctttgtgtttcttctgaaccaaataaggaaacaccttttccatgctgttgcaaatgtgtaaacaagaaatcaactatcttaagcaaactggatcaataaaatcaagtgaaaggggaataaagctgacataagatttgcactgtaatcagaaatatttttctaatcatacaagcacccaaatttgatggttggaatgtaggtcaatagagtaccttttaacttcctgaccaaaaagtgatacaaattttagcttattagtattaacaaattttgcatcaattcacttctatatagcaaaaaactctgtttatcaatgcttccttagagctcttactttaacaaagaaaagcaaaatataataagacaacacctatgctcccacttgggtgccaattttcccactaatctaggatatttgagcagctggcatcaaagaaaaagggaaagttagtagagtttacctatccattgaatgctgagttaagtaaatgggggtgggatcaatatcattagtgggactaaacggctgcacagctcgtatatcatccaatccaaggactgcatcagcatgttcatgagtcaaaagaatctgcaattcaaacaagaacaaactaacttaatacaccaggtaaactattaccaaatcaagctccatctgcaacaaaacaaggcacctgaacacatacaaagtttcactcatatcgaatctaagttttgaaaatctttgaccaaaataataaaataataaagaaggagatataaggttgggtgattgaaagaagggaaggagggaaaggtcccgggtttctttcttgctaacaaaaaaaaaaaataataataataaagaaagaagggaaggtgagtgggtgactaacagaatctattcttggaatgtgatggaaaacaaaccacctaagtacagtctccctgaaggtcttgccagcgtcgatcaatatatatttgtgagtggcgtcgctttgagagtaataatcgattaacagagaggtattgcacctgcaaagttaagtcaataatgaaagagctcaattcagtcactaatttgtaagtatggaggaatgggaaatgtgaagggaacctgtagttagggtttaggtgaggtgggagggagagagattgagtgcagacaggacatggagggtctgaagggtcgatgaggcacctcatcgagggaaccgttcctgaaactcccgttcccagaaatatcaatgccgactccatagccacaacacaacactaacggaaaatgtaacaaaaatgtttggacgaaccaacactagagatcaagtcatgtatctttcataaaaaataattctggtctttaatacaattttatactcaagattctaattcagacttgacattttttgattaagttaaaagaatcttatgtcacacactcgatgatattttcagtaacacagaaaattgaaaaggagaattgtaataaataaataatttatataaagtaattttaagattaattaaaaaatgaaaattttattattattattagtattttctaaatataaaattatttctaaatataaataaattattgttccagaaattaaaaaataacaaatcatacctcatgccaatttaaggggagggaggaagtattttttgacgaatctcacaaaaatactcacttctaagtagcagtagtcattgagattaaaaaaatgttaaataaattattaaaattggaatttgttagtcatattgttctgttagtaagttatacatgtcacatgccagaatgacaataattttaattttaagaatttatttgatattttcttgatttgaaggactattataatttataacaacacttcatagatttcggaattaaaatgatagttttttcaatttttttacttcaaaaacttttcctgccttaaacttgaatatcatcttcagtccctaaattttactcttaaaacaaaaaatagctccctttattattgtttttttttcaaacaaaatgtagaaacttgatatttttactatttgattgaaggtattgatcagtccacaatttatcaatgcaaactttacaacggaaaagtgttcatagacatccaatatgtcattatatacctaatgagaaatagagaaaaatataggtatcatagatattttaatgtgatatgatgaaagagataaagagaaactatggatattgattatgtatttaaaaagtacaagtgtgtgttacttttgatgagaaaaagggagattcatgtccacaagtattaccttactataagtttatgggaactctcaaaccatcgtgagcaagctgaactgatagtccttccctaagcacaatcatagaagaataaagtctgtaatattctaaaattcataacataacagagtacaaactacaaaggtagtaaatattttaaccaccttcacatagtactgttaatactggtgtcgtgattcaaatatattacctattgcatttttagcagttaaagttgacttccttgaaaaatgggaagtgtaccttttggaccaccccattaaaagctcattgtccttgtggtgatcaaacttgtaattcattccaatcaatagggtttactttggatgacctctttacagtttcgagagtctctgaaattacaaataatgctatttcaccatcagtttgaaaaatgcggaactaaacctgtggaagacaaaagtgaacgttaggtgatccagtctgtagtaatgcaaagacgaatatcaagaagtaaacaactatcttttgagaaaataagataagtataaaatagaattgacaaatatgtatcacaaaaggccagactgaggatgatcaatcaaataaggtgaagcttcacaatcatgggacaacaatgatgatgcatcttgcaaaaaacaagtgtagaaaaaatcaaacagaattgtttgttgacgattgagagaacaacaggaataacgagcagaattgtccattcagaaattgatgaaaacaagtttcaacttcaacttcaaaagctgataaagcaatgaattattggggagaaaacattgtttccaaatcattccgctacaaataatcgatttacatttattctgacatgtcttttttgctgaatctatctttacgcgtaacttaaagaacaaaaactggatactaaagtttaattgttacatccaatagattttatcttaataggagtagtgtttagtaatcgtattattggcctttcacgataaagtttgttgagatctcacgtcgacttgatatatcactaatgtagtctttatgtagggttgagttaggttttaagactaaattctaagatggtatttaaatctattgtagatttgttattaggacactcatatttgtctatgctgtcaatgtctattactactcatgtgcaggtattgttattgagccattcgcatttgacctcactctatatgtctcgccctaggtgtgaagggtatgttgagatcttacatcaattagaaataagaccagtgtaatccgtccttataaggcttgggcagttttcaccttacaagccgattttgtgaagtttagttaggctctaagtacaaattctaaaatagttatcttacttgtgaacaagatgttttgtttgtcttattaaaaaatcaatggggaaacttactataggagacagaacgcttaagtcattctgtaaaacaattgacaaaagaatgaatcatatcaagccatacaaatgaagatctgacgaagaaccactttaagtgactgctagtagcaaaatcctacgctaggaattgagaaattgaaaggaccagactgaaagatataatgcaacacagtgaagtcactttattaaaaaatttgtatgagattcttctacacgcgagtgcaagtggcaagtgcattcttatcctttgcaattcagtggcagaattcacacattcacctggaatacaatatccacactccataccccacacatccactgacaacaattgaaaatggaagcacttaacttttccaacgcatccaatataagaagatccaactgtccagtcccgcttcttgaaatgactgtagacaattttgctgttagatgttacaaagcacacttctgatagggttttataatgatgcattaatgcttcaaaacgactcattatgctagctacattcctattgtttcaatgaggaagacaaggctacaaattcaagctattcagcagctatggctttgtttacagttaagtaaataatgcttacttactgcttcttcatgatataacatccatgagaactgaattaatttttcaggtatgatactaaattatggttgatctttgatgagttgcataaacaaatattgaaataatttctttaaatgagtaatttgttagttattttcttataaccttgtggttaatatcacacttccctcttaacttactaatcagtagtcagtagtcactagcattagatgggagatagtttgaaaacaaaatctgctcaattgtgactctcttacttatcacttgactgaaaagaaatggataacattgggtatagtaggttgaactattgaagtagttcgctatgctcttaaatttagagaacattaagttccacaatgccttaaattataataccttagtattttctctgactattatagtcgtttgtggcatacactatgcagttatgtcgctcttttgtttacaaaaacacatgacaataatgtgcatttctgggtgtaattataatttcataacaccatctccccctccctccactttttttattttttattttttattttttttatgcaagttaaaaacacaaaaaaaagcccattttctcatctatattctttcttcacaatccaatccaataaagtttatgttatgagagataataacactaatgaagtaacacacatgtccaagtaggaagaaatgactttaaaacgcactatactctgtactatctggaattaatgaaacataagatatataagccaccctatttttctcaccaaaaagaaatcccaaacggatataatcctctccatgcattacctacaaccataaatgtatcacttaagtcatcataaagtaaaagggttattgcattcctaccaccaatgacaagttttgcagtgaataacgggcaaaggaatcaattttgagcctgatgcaaaaaatggctgattacaatcatcagcaattatgttccagcaaaactgagatacccttcgtatttcttgtgcttcttctttgtgttttttctgaaccaaataaggaaacctcttttcgatgcttttgcaaatgtgtaaacaagaaatcaattttctaaagcaaaatggatccataaaggcaagggaaagggaaataatgctgacataaaatttgcattgtaatcagaaatattgtctaagtatacaagcacccaacatttgatggttaagaagaacacataacacgtgttttcatcttaataactcatgcacccgcaactactctcattttagagtattttcagaaagtgtaatttaattgagttcttgtaaataactgcgatgtgataacaacatgagttaaatcatcaaatgctgaaacttaaaattgaagagctatgcagatcaatagagtaccttttaacttactgaccaaaaaagtgataccattttttgcttaatagaatcaatgagatgtattttgagtcaattgactgtatagcaaaaaaaaaaaaacgcgtttaacaatattctctaagttcatctagtgtatatgctttcttaaagctcttaatttcacaaaataaagcaaaatataattacacaacacatatgctcccactaggatatttgacctgctcactctgcatttgagcatgactctgttactttgggtcactgtagagcacatttaacttgtaaaacttttaagtgacatttctgtaggtctaaagaataaagaaagtagtgcatcagcatgaaatttcaactttatcagacaagttaaataaaataaaaaggtaagtttactagagtttacctatccattgaatggagacttaagtaaacgggggtgggatcaatatcattagtgggactaaacggctgcacaacaagcatatcatccaatccaaggaccgcatcagcatgttcatgagtcaatgcaacacaagcaagcactatctagtttattacactaaataactattaccaaatctaaatttgaaaaatttaaccaataaataaaaaataaaatagtaaagaaacaagggaagttgagtgactaacagaatctactctaggaatgcgatgaaaaacaaaccacctaagtacaatctccctgaaggtcttgccaacatcaattaatttatatttgtgagtggtcactttgatagttgtaatcgattaatagagagctattgcacctgtaaagttaagtccgtaatctataattattataagaggtataatcccatttcttttggacatttttactctcaactattatatattactataacattttattttaattttcaacaacaactgttatatctttcaaaacaagttacacccaatcttatatatgtaatttccaagtgcagacacgaaatactttttttgcactagtatatataatgtaagacttaattcaaaattagcacaaacgtataatgtgttgtcacgttaatccttgaaactaaagaaattccaaataattttctgaaatttctaattgtttcatctgagttcctcaacttaatcaattattattgttttagtccggaagcatatgtcaatattatcatccaagtcaaacataacattttgaattttggactaattgattgacggattgcaatccagtttgagggactaacgtgacagtactatacactacttaaacgttgtttacttgtttctgaaagcagtgtttgaaaaatgaaaattgtcacataattcattgaaaaatgtatttcatgggtgaaattagtatgcgtgtggctactgcgttcactcgtagtcgtagacgagctagatcgttaaaatgcatatttaagcgacttatgtgttaatttttatgctagagttgaggagaggactaatactaattttccgtgacactgagagtgaagaagaagcaagaacttgtagttaggattgaggtgaggtgggagggaaagagagtaagcgcatacaggacatggagtcatggaggatctgaagggtcaacgaggcacctcatgcaagaaaccgaacccgaacttcccgttcccagaaacatcaatgctgattccattgtcacaacacaatacaagcagttaagtgagtaacgtaggagggaaggaagagctcaagagaactcattttaatacatatatagcctttaatttgaatatctctctcttcacacgtagaatataggacacaaaacaattcatattttacgtgaaatcctgcattttattttattttatttatgaacaagttcaaacaaggactctgtttaaacatatctatatttgccattgtataaacgaactgtaatttaatttataagatatgtaaagaaaaatatattatgaagatggcgtacgtatgttatgggcggtccactgatcaaatcgccccacattttaggacaacaaaacataattaaaagtaacaaaagatgattattatatatatatttattgtagactaaaagtttaggtgaatttgcttctaggaatttattaggattaggataaggtttatcaaacttttgtataagtatttataaattatccattaataagttctttacatcaattgcgaaattcaaacttatatctctgtgggatgagtatgatgcttattattcattactaaggttataagcacaacttgattagcattagagccaagtcaaaaaaactgaaacaacacgttgattgttgagcaaatagaatcggaaccaatgagaagagcacattaaaaaccaaaaattgaacaaaacgtacggataaccgaggaggaggaagagaataataaaagataagcatatctggtagagatgagcccggggtaaaggaaacggtggcagtagattgcgacttggggggagttgcaaacaaaagaaaaaagtaaagattaatgtttgtgacgagattttaaatacgttttccagttaattcaaatgaaaaatttataattttatgtccttaaggtgaagtttgaaacacgttaaaataatatacgatgcaacataaaacaaattatattttatttttggcatatttgaaaacagaacaaaatatggcacgagattagaagttttcttggtacgatatatatatatttttttgtacaaggagacttagaagttaggtggatatatttgagttttacttaagaaaaggtaaaattaaaacaaaaaggaacaaaacacaacattcttattttgtgttgtgcatgtgtcaaatattaagtttgtagaacatgattcttaaaataacatgtttcaaatagcatacatttaaaatattatatcatatttaatattatttttagaaaaccaagagaccagctcatacaaatccgtatttaaaacattatatgatatttaatattacataatttcatcagccaactgaattaaattctttcaatatttttttaaattctaatatcagttagttaaacaactttcaattttgtgtcattttcttttacatttcattgacactcatgttttttttttgttagtcgtcctttttcataacatcacccattataccacttaagagatataagatttatttaatgacaaaagagaagacttaagaatattgttggtttgaatctttcacttatatttctaacaaactaacatataatataaaaaagtccatcatatcacttacttatttataaacaatcactccccaatataagattatctaatggtttgattttcatatgtacctagatttattggtccaacctaaccttactttgagtcggtcgaaggagcggtgctcaaactgtggctgtaaaatcaataccaaaacaattaatcatgatggtggtaaccagctaaaaaccatttatataaagcacatgcacttcatgccacgatgaagcaagaccacattctacttgcaagattaaccaataagcagttgtaagggaggtagtggcatggtaggatataggcataagatccctaaatggattagttttgaggaatcttgtagggcagatgctagtgcatgttcactttccagtgtcacatgagaagatggaaatggggccaggatctagcttttggtgattgaacaagaatggcatgcgcgaacctttgtatcaatatgcaacattgaatgttaggctggtggggatataatatatatatatatatatatatatatatatatatatatagttttgaagagataaattcacaatgtgcttcctaccccaaaattgtgtggtttgccattcagtagaatttaatttgattacatgcatgttacgtacgaccttgttgtaatttcaactaaaaagaagaaatgaaagaacggaaaggtgtgaaagactaatgatttaagagaaatgcatgcaagctttgacttgcttttgctattttgcacagaggacatgcatggtgaaggtggttttacttttcacatgcaaaggcaacaagaaacggtttgtgtttgcctaagggcagaactgccaatgattttgcttctttatttccccccctcatttgtttaatcatataaatttaggagaagtaagatgctctaccttgtttcatatatatcacttagggttaactagtaaaatgaattgaaaggaaatcatcactttcaaaaatctgtatatataatttcatccggccggtcatacacattgattgcttgttctcaaagcgctaaagggaaatattaacaactcgttatctaacacatttattcaaaattataaaattttatgagttgtatttcatttttaataaattatactaataattttataattttaatcaaaccatagagaatatgttaaaaggaatgtgtacgttgccacactcctcatatatagtgcatgttatactactttccagtttaggaaatcaagattatatgaaataaaaaaaaaagaagagaccctccattctatatccaagaggtcaaagtaaaacactacttcacgtgagtgactattaattctatggggaaacttttatgatcaatattgtcaaccgatatcatacctatctgaaaccactatacaaaataagaaatccaagtttcattatgaagtagcgaattactttaagattatcaaacatctatacggtacccaaaaaaaacatctcttataaaaataatttctaattttatatttttcaactgccagctgattggtgcttgaaaatcaattcacttcatgattgagaaatacgaggggacaaaacacataattagtgaactcaaggcattcaatccaaaaccttaatataattaagttaggtttgtgttttttttttatagttatatgttacttaacttgttaatttctattaaacgtaagataggtagataccttttgatggatcaaatcaaaccttactctcatggaaacccaagaaacaaaatatcttaagtatattattcgacagttattggttcttgaattgaaaagtacttgaaaatgaggcatcaacaacaaaattcatcctgaacagttctcgatctgtcgtacgtagaacgtacaccgatagatcagttttcttgttcctcatttaagtattcgactacaacgtctagatataatactatattcatatgttctaatcagttatctcttgaaatagttaaaggcataatgacactctcatttgatgttgaatacgaggaagacgttgcaatattacatagtagaacattgtgtttaaatcatagcaatactacagtgcttcctgtctatacttatcttgtcggaaatatcttttatatatatatatatatatatatatatatatataaagggatcaaattaaactggtttaattttaacaactattatatcatttttataatttaatatacaatatgacttttattgattttaagttaaattatatctatatattatcaagatttttttttgtgttaaattttatcaaaattaaatagtaataaaaaggtaattaaatgatctatattttaatatattttgaaatatttatattatatcaattttaatatatataaacgagataacaaataaatttagattaatatgaaattttacatatataatcaatgtgaaagaaactttcaattcaaatatgagttttaaaaaaatattatctaattaaaagttataaaaaaatataataattattagaattctataaatataaatatgataaagataaagttactgaattttagctaaatctactcttttctctttcctttgaaagttggcactatctatggatatatcagttaaatctacaattctacacttccttggaagtttggcacacgcctgattatatgtcctgtggatagtatggtaaaagaattgaatagatgtgattgacttagaaattctaaaatggaaaaactgagagaaggaaaaaagaaacactaattttaattaactgtaaaaatgtgttttttttttttgagaaaaaattgattggttaatacctaataggtacccagtcatatctcaaatcagaactaattttagtagcgtgataccaaatcgtgtatccttttttaaaaataattttaacaagtatctaagtgcatttacaggtaccaataagaattgagatcacctttttcgtgtctcactgcttgtctctctaattaaaacttgtcatttcaattaaaaattactacatgtaggatttggaatcttctcaatacttctttcgcactataaaagcgcacacacccaatacgttcttcgccatctactcctaggtcaaagcaccgtccaccacaacaaaacactgatttatagtagcgagccactaataattaatgatcatgagaccgtcataaaatgatattaaattgaaaagtaaaagagtgatttttgtagttttaaatttaaaatttagtattagtaactactctatcttttatttgttcaaatattacgcgatacgatcaaaatcataacttatcttcgaccaagaatcatggagatagaatgacattgaagactattataaaaacaaccctcaacctagagagcatatatacatgtcacacacatttgaatgctctggttaagtctcccaaaccttagaaaaacttatatgagaaaaatattgaagtatactttaatcattgaaaatattagcatcgtactcatcaacacattttttatttattaatgctgtttgaaagacaaagataacttgatagacgatcaaataaaagaaatactaaaaaatatagatacgtcagatatttttaaggtataacttttatcttacacttaatatatacactcaaattcgtaactcttgatatggaaacctattgataatcataaaattatatgaatattttccctattttaataagttttatttatattttctaattttaattatctataaagaatgtggtaaaagaatattttactgtcaacaaaaattaatccatttgaaaaagattagactcattccataaagatatagtttgaatccaattgtcaatataaaggtcatgttagaaatcaatctataagtattttttaaacctttaagatatgttttatttcttgtgagattctgaaattcaagtacctagaattttgtctacaaaaaaagtattttctaattcctctcactaaataatggaaactgagaagtcaagcttacgtatcactcttgcacgttgatattgcatttaaacgaccaattacaatataatggagaaagaaaaggacacaataaaaattgaacaccataatcatttaggccactcggttagttgttggtagtcttgcatcacctcagctaaaaatcaaaagtataatgattatgatctctaaatggaataagtaaagggtgaggctgatctcaaatcaacttaaggcatgcattgtccccttttgaggcatcaatcatccttccactcgtccactttttgtttacttttttcttcttcagctatatacataaatccacagttctgacattttcagccaatcccccaattaaaagcaataattagtgacaacaatgttctaagggtactagcttgtttacccatgcttctttttttcccttgaattatttttatccgcatattcttttccccaagttcaaaataatacactccaaaacaatggcttgacaaactcgatttggggcatgacgacaaccgaaagggtaacacagaatcgcatgtcccacagaaaaagaaattcaaaagcatggtgcgaaaaggaggaaaagaaaacacaaccctcattatgatgtctgtggggacttcaattccagcataagcatctttccaggaaaggaaagcaattctatcccaccatgcattttcccttcaattatcacacaccatttgagagaaagcaaaaacaatcgtaggatgtaaacaaaattaattttgagtattaattaacctttttttttacaaattatttctatccatcagttttcagtaagtaaattttgagcttatttttattgaatataaaatatttttacacattttgtatttttttaacatatttaattaattatagatcatattaaatgtttttaattcgcagaattgatacaataatacaagatcttattaccgtattaacagtctatctaatatgaaaattatgttcaatttcattcttatgtacacaccataatcatgattaatcttttgatcccaacaagttacacaacacacatagtgtttaaagacccaacacaaaaaaatattaaatgtcttttattgaaaaaataagactctactaaaaaataattaaccaaattcatcaacaaaacttaattattggcaaatttacatctataacatgataaaagcacacacaaacattttatataaacttgaatgaaaaagacttagtatgccatacaattaccttttaacatctctataaataatgtgaaaagtataaaagtgaaaaaaaaaaaaacgtcgtagtaggaaaaaaagagtgtaaaagtcaatcaatgtctttttcacaaatcactttatttcttcagactttctttttaaaaaatttgtgcgtgcattgctctttcaactatcactctatatattagcgtaagctccatacatcaaacaatcataataattaaaaacaaagcacacgctacacattgtgttttccggtgattattccggcaactgcatgcaccggtgaacgacgccggaaatggacgagtcacagagaattggcatcggcttaatgcgtagtttccctagccggagatcggtcgaggaccggtcatcatctcggcggcgacgctccatcttctccggcccgggcatttcggaatctgtggacgccgacgactttgccgacgtctttggtggcccacctcgaactctccttgcgcacaaactctctagctccgggtcgttttacgaggaagttttccggccgccggagttcacgtgtccggcgccgaagggtggccggagcttgccggtgttcaggattccggcgaggaatgagggattttacagcgacatattcgggtcggacgatgaccggagatcgagagagaggtcgaggtctctgtcgaaagagaattcgtcatcggcgatgagttcggaggagataagccctcgccggccggcgattggagatgacgtggcactgtctggttttgcttcaaagctaaggtacttttaacagttgagagaatgagagagtcacccactgagaactcaactgtttttttttaacaattttacatttatgtccttgattattagttatatttgcataactatctccttcttgatgcatgcagttcaaccaaccgtgttagccaaattaattttgatttaaattgatgtaatttatgtttaaatatttttattacaaaagtaagttaagtagtaaaattcagtctaactttttggatgcaatgcaaaagttattaaagttattttaacctgtaatcaactatgaattccgaatcaattgttttaacgataaactattgaaaattcacccagaatcatgttaataggtatttcaacgtcatttatggagaatcgaatgtgaaacaaaacactgcattgagtgcatgtttgtatatgatagagtctaaaagcttttttacttaaagtaatattttttcttttttcttttatatattgaaattaggaattgcatgttgaaattcataagaatagttttttaattttaatccaaacaggccaatcaatattccatggagatggaactcatccactgtgatgcctgaggctgaggaatacccaagtaaacttggggtgcctctttttgcatgcaaggatcagtcatttgaaattcagcatcaggacaatgaatacaaggaaaacttcagaagcccccatttaggatcctcaagaagagtgtcatccccagaaaccattagtctcgaatccaattcatatcaaagcatcaaagtgtccactgatgactgggagcttaattcctcattttctgttgtctcttcgctttatcaagaacctgatgcaaaattttcagtgcatgatcatgtgctttcagaacaaattatagaaggtgatgatgatgacgatgacaacgatgatgaaattatgaactcctatgtcattgaactcaaccccaacctcagaagggaagagtgtggagaatcagccattgatgaagcaattgcgtgggccaaagagaagtttcaatcacgaagctctgatgaagaatcaagcgtgagaaactatggcaaagagaaaactgttggaataggtgattgtcttggctaataaaaagttccatacaaagttaacatgttgtagtcttgaaacaggcaatagcagacacttatgtttgtatcgtatgttgcaggaagctctgatgcaagtgaataccatgatgatggaattggaatagttcaaactcaggaggtaatatattggataagcctaaataagtatcagcatatcatatcatataactgatacaagcttaatcagatcttttatgaaaataaatgtttgaaatatgatgttgtaaaattgtgtgattaaaattgtgtgagtaaaaatgagtaaatgaatttccaccaaaaattacatgtattttctgaagcagtcaatagttccataccttgtaaaggcagtggctcgtattagtgttttcctttgttattttatttctatttcctcagaataaaaagtttatcgatacctgtgctttttctacagaagcaacagacagaaacagagaagttagacagagatataagattgtggtcatctggcaaggaaacagatattaggttattactttcaacactacatcatgtaagattttctttgttgatgatttcttatgactgaatttctgaaatctaatgttttattcgccatttgagtatacagataacacaggagaattgacctggttatattttttttcatttccagattcttaggcctgagagtggctggtatgctattcctcttaagagtctattagaatgctcacaggtgaagaaggcttatcagaaagcaaggttatgcctgcatccagacaaactgcaacaaagaggagcaacactccttcagaagtatgtagcagagaaggctttctcgattcttcaggtgtgtgaaatttatagaccatttatggataaattctacttctattaccattaagtttttttgagacaataaagaatgcactgaggatcaacgctgattttcaagtttacaatgaaacaggatgcatgggctgcattcatttccatagacgtttccttctaaccagtagatgactctaatcttgataactcagttttgtcttgagatttgtggacaaacaccaagcttgacattcggaatgtcgggagtgttggttgacaagcagcagatatagctaaatacatgaaactttaaaccatcagctcttttgtacaaatagttttactgatggatctgctgttttatttatgtttgtaacataacttcataagctgtttgttgcatgggtaggtattatttctgatgtagttaacagaaggtaatttgactggtcttagtatttgatttgtatatgatatgacatggaagcaagagttagtttgtatatgattcatatggaaacctataaccctattgcaactccatctcattgactacatgtcatactcaagaggtttcaatctcctacattttattaggaaaagaaaaactattcaatacccaatattaacacatgtaaatgcaattaatagaaattatttttaaaaaaaaaattataactacaatgtctcaaattcaatgcaattataaaattataactatatgaaacacaaggtggatatccttacatctaattgagttttatttgaattatttcccaatcaacataaggcctcattagcctttcaactataaccataactagtttaaatagagaaaagagtcctgcaagagtttgtgcataagtgggtggctttcaagcagccttttgggcttatcagttggcattcacagggttgctgtgggttgttcggaattagaaggaagtgaaggataataggaatagaagacgaaagaaaagacagaaaagagtctaaaagcaacggctcgtgcaactggcgttgtagacggaaaataggagtgagactgtcatgccattgcgggatgacacgttcatgtttgtttttgaatttgacatatatgatcacctcagtaatgaaatgacgaaattcacatttatttagcagtaaaaaaatgtacaccatttgaaatttaaacagaagggaaattttttaagaaaattctaatttaacacattactaaagggccaaaggcctagacacaattccgccataaaaggaatttccagtatttacaatttttaatttaatgctcaaattacacgtctttgaagcaaataaatagtttgataaaaaaaaactattattgattggcaacacagaatgatgcaagatccccgttctgctgaacaaccggtttccattgtggcattagcatgtgaaaaagtcggggaaaagcaaacatgtctgctacaatctcactgaactttaagcaagggaaactgaaatatataagcataccacgtatagtttggttaaatacgcctctataatcctgcaaaagctaggacaacaaaaacagttagagaaagcagggcaaagcaaagtttgagttgaaaaaatagccatttaactcttctaaagtaaagaagggttcatccacctttgatttaaggtgagtaaagtttatgaaaaatgtcaagacttaattatcaatttgatctccaaatttttaaaagctctaatttggtccttcagatctaaaaacacacatcaatgggtgttgttgctgcatattccttctattctcattcctggcgctgttggtgctggtaacaaccctagcggtgaagccaaagaagctgcagtttgatctggagcaagttggggggggggggggggggggggggggggnnnnnnnnnnnnnncactgcttcaccctctctcatcattttcctcctcttcgccgccgccaaccccaacaaggtcgcgatcaggtatggccagtctagcttcaccatcatgtaccgcggcatcccattgggcaaagccaccatcctcggcttctgccaacaacttcacagcaccgacgggtcatcaccatcttgtttcccctcctcagatctgcacgtgttttcaaggctggtcgcatctccaatttggtcagagcagagagggatgcaattggagagtaaggagaggatggagacgttgacagcaagcatgtaggccatggtgaggaaagtggcagtgtcggcacggaggtcagtggtgaaggtggagttgcattggggaggaagagaagggaagaagataatgaaggaaaggaaaagaagaaaaaaaatatagtggtggtttttagtcgtcactatttgcaaattaaactgccaggatttgcatcctaactgtgtcagtgtcaatttgatggaaaggacctaactgaggcattttaaaaaaacttgagggtcaaattgaatcttttaaaaacttggggatcaaattgaatcttttaaaataatttagggaccaaattgataattaagccaaacattaaattaaatttatgagtggatacaaccttacttttctcatttcacatgcttattcatttcagaggagccaaatctatgatgtaaagtgacaacactttgtttatcatcaactttttaagatataagtctataacattagccacttacaaggaaatggaaacacacccaatactgaaacaaaatctcagagttgaccatggcttcggctcatagagtggttgcgaaagagtttttgaccaggtgcttgctggtcattctgctgcaagagattcaagccagagaaaatgaactcaaattattcaatgtagggtacacacatttatggattaatttaattacagaaacaaacaacatatgaagaattggatatttgtacacaatttctcctaaagttttctgtcttcctctaccacttttggttgggatgtcttccattttaccttctccaaaagactgatttgaacttatacctaaactaattttaacttataggagaagcttattcatttttttttctaattttcttcttttataagtgcttatggaaaagcttatccaaacaggatcctaatgcatattataagaataaaaaatgcatacacatggaagttggtaaagaaaatctcagtttgtcacctaaaggaacctaaagaaatcttcacacccatcaaacaaagtgagacagacaaaccttgtacaaggatgcagcagactcagacggtactgttggaattgcattgtgccccagcgacaaagcatccaaagcatctaatgtcagctgccaaccgcaaagggcaatttcatcactacttgtgcttggaacagaactagcacagccagcagcagcaacattgccattcacccaagggcaacattgattgtgatgcacaataggatcaaactctgcagcttcatagttactctctccttttggagggcctaaagaattgctcaatgtcagtagctatgctccaaaaatatgtacaactaatgaatgaagtgcaacaggagtacaggcattggaagaaatagatatccattttcaatttgatgctagatgaaaagtagcgacaagagtacatatatactcccatattagaatatatagttggagagtgatactctcactctcacttagacagtcaacattccccgctcttctctcttttggaggtgcatttcacatactacttttgcaactagccaaaaaaaattgtttctcaatgactcaactatctcaaactaccctccttttatcttatatatttgtttctcaatggcaatagtgaaattttaaaaagccacctaggtttcactttttcaaagatttgtaagggaaatggtggacaccaaaacggttgtgttcaccatttcctatacaaataaacaaaaataaagtggcattttagtaattgtttctgaaaacaaaatgttttctcaaataaacaaaccctaagtttcatggtaacatgtcaacaataacacaaaaaaactttgcccactaggtgaagcttgctacatggatcatgcaacacaattgtattctgtcatgaaccaagttttcaaaatctatttagacccaagtctttttatttgtctcacccagagttttttcttgatctttcctacctctcattattggactacctccataatccactctttattgggatttccattgattttcactcacatgaccaaaccactaaagggtgagaagtgagaaccatcttttcgtgctacccctactttctctaatgcatttattcttgatcgacttctgtagcactgacaaggcagggtaacaagaaaaaaagttaaagaccattaaaaatacagaggttacctatcccatttgcaatggcaaaatctgattcagggagagcacgattgttggcaaatgatgatttaccatccttcatgaccccttccttggtattttcacaaccagaataaacattagcattacaagaacgagatgggtgactactattagcaggtagaagattgcagttttgactaatcttttcaccactttcaacagattctgcctttgtagaacagccaatttttgacccactgtctgttcttcctgcagagtgagtcatcatctcctggctatcaccaataggatcttccctgttcatatcagggataatctcatccatgagacctggatctggaacagattcacctgtctgtccctgattttcagcatcttctactctctgttccatttcaccaacaacactatcagctctgtgcacagatatatcagccccatggatctcagcttcatgactagcacacattccaacactccctccactgatgcccaaactaattccatcacgagcctgagcagtcacagtttccgcattgaaaagttcttccccatagtttgtactactgacgcccacatcaccacgtgcaacttcagtagctgtttgtaagcaagtgctttgctgagcttgattgctgttattcagttcagatgtttcattcatgtccacattgccatatatgctagaggaggggaaatgaacatcatcaaggtctccagggtagttttcaacactttccatagaatcaccattcacactatgacatattgtgtccattgcaatgacagatgatgcacgggttgagtccctagctgattggatacccattgggcgttcactaccttgatggtatgaagaaactcgatttccagtaacgtaagcctctaaacccattgaatgacttggaccagcaccagatgaatctcttcgatgaggtgagcaatatgtgtcaaaaatatcagagtcacgtgcacgttttgaaggaccagctgaatattgtccaccatctgtaacttcatcaccatcacgatcaatgacaattccttcaagactatcagcctgctgctgcaacctaagaacaggcggattatctgagcttccacctttttcaagatttctcttacgagagcttggcccatgtgattcatatgaagcggcacgatcaccaatctcgctccctgaaggctgaccgatcattaaatcccttcccatatcatcatgagtatattcagatgtagctgtcctgcccaaaggagtaaaaggaaaacccgctgccatggtaagatttaaatctaaatccgtgttcgccaataatttcccctcatttgttgttgcaacttcgtcacggtcttcagtctgatctttctccgtatcgtcagctgcaatccaaccactgattccactagcagcactcgctccacgggtcaatcctatttttttaccagtatcaggaatatctatactgttagatgcaaaacgagcaggacgaggaactgtcagaaaatctgaaattctaactgtagcgccacacaagctacaatcaagcaaaggtgacctagagtcaagtctagactccttaagaggcgccttttcctttctggcatccaatttagtagaagcagaaactgcctttgacccaggatcttgagtaagatgaagttgagttttggttggcccaaaagaatatccatttctttcagattgggcagagtgttcttcacaatcttgaacatttaaaagccagcttgattcccacccacaaaggctaataagcttctgtgcctgccaaaaggaagatacattaatagaaaataagcatgtgacagagtagcaagcaaagtattaacaagacataaaaaagtaaaaaaagaaaagcttacacgagaatataaacagtatgcctcatcttgagagttttcaagctcagatataatgtctggtttgatatctacttctcctgacataaaattttgagactgtgatagaaagcgttcaatctgtgggccacaagaaacagacatcaactcaattgcagagatggctaccacaggaagacagtcaaattgtacgagtccatcacatctatccttgtagcccccaattaaggcagatggaggagttggagggaactgcactaagctttctggacagctgtttcctttccaagggcagttaactttatgatccaaatccaggtgcctggcaaaggattcactggcattttgagctttggcaatgacaataagaaaacaagttaaaaacaactgatgaatataatcagcaacagcagagaagtcctttagcctagctaccggatacagtttgcttgaaaacaagatcaaaataagattatatttgtctaactctttgaagaaaacatatataaaaagatctcaaatgatttgaacagaataagagtcgcttgaatataaagagtaataacttatcttgtatgcacaacttacatactactttatttttatttttggtaaagtcttgttatacaatacattataggaaccttgaaacaaagtggtacaagtaactaaattacatccattattattatacttacatgctaactggtcttaatgttaaaaacagcgcatccacccacacacacaccctccgcggcccggtaacagacatgagctgaacaccctaatgaaatgaaaaatataatcctttccccataaaatatttcagacgaattggcaaactaatatgtattaaatctcatttgatagacaactaattatacaacatttaggtacacatttttggacatataaaacttcatctaggcagcatcattgcttttaatgttctacttatacactaagtgaggaaggactatatttatgtttggggatttacaagttaacaatagacagtagttctctgaaagtaaagctacacttgtattttcatcctataattttctcaaaaattctccctacttctacatctgccctgtacataaggtacctcaacaaagtacgccttttaacatccacgatccacatgaaagcattggctgttcttataatttctacctccagttattaacatgccacattttagagaaaacataaagtagccaaaagtacttagattacaaatttgcaatcaccaaccttcagctgatgtacaagatggtaatgctgtaaaactcagacaagaaccacatgactcgcaagcaattttgtctacaccattattcatccagcctttctgagcacaagccaatgaactgatgatctggaagaaattaaagaggacatgtgatccctggagactgcatcatattatctacttagaagatttggagtggcaagtgccaattcctcggacaactacttcatgcgaatgtgacagatcccagattaaaattaatttcagtagacaaataagtagaaaattcacatcaccaaacacattcagctggatcacttagtgtcaaagcttagagtgttactatccacacaaatgtaccaaagacataaataactgcacaatgcaacccaaattcagctgtcactattagattacaggctgtaagtagaacctagttttctatttatggtaaaaaagtgatacatgataatgattttgtttacattgtataacaatttaggttcctatcataatctataagcataaacagaaactatcacaagggtaatcattacatgtttaaaacaagcatatgcagtgttgacttcagacatacaagatacaactctttgtcatctaggcttacagaattcattattaagatattgaagtataagtgaatcagtaacatactacccacaaggaaaagatggacaaaaatgtacatatgcacattgtgacagtaatataattacggaaaaccatggtcagttcaaacctgaggcttcacaagccaatttgaaggaataaatgtagccaaacgtcttaataaatctcccctttcccaaggtctacatgaagatcttgaagaaccaaaagcagaaccaccagcacttgtgctcaaggaagtccatggtggttgtgaaccaacacatgagagagaagccgctttagagacctgcccatgacttgacccatctatgctgccaacattcactggaacagctggggatgatgccccagcagaactgataaaattatgaacaatttgtcaattgagagggtcaaataaacaacataaagaatagagaaaacaattgaatgtcttataaaaatatcacaatttacaatcaccagccatacatcacatatgcattaagttcaaatccataaaaaattaaaaaaccatctgttttacatgaatcaaggaaggaggttaattctaaaattgagctttacaaacgcacaatggaaccgaagggtattcacttcagtaggattaagacatcggatatatctattgcaattttagcaagaaaggaacaaaaagaaaatgacttggaactaaagattggagatgtcattaagtatctggatcaatattacaacatgatagagtaattaatgaatttgtcaaacactggatacaagttgagtggttaaatggagaaaggaatgagattatttgtgaccacaaagcacttaccaatcttaaagggaagttttatcatactgctatacgaccagctacatattgtggtagtgaatgttaggctttaaatggccaacaagagaaaaaggtaggaatagcataaatgagtatattaagatggaagtgtggccacacaaaaaaggtcaggatgtggaatatttgtatagggggagatattagtgtgacagctatcaaggaaaaatgacaaaattggataaggtagcttaaacacatgcaaaggtcactagaggctccgaagaggagagtagatcgcagtttttgtccctctgaaaaggggtagagggggatcaaggacattggaaaaaaatattaaaaagaatcaggtagtgaacaatatcctcgaaaatttggtttttaactgagcccaaagacatcatataatccatgtagtgacctcacctagcgagataagactattgctgttgtatctgttttacacaaaggagatatactatggtgacgatttagccctcagtgtgggtatttagtagagaaaacacgcgaggcacccgaaagaaatatttggtaggatagcttatagcctacttacttgcttaggaggttaagctccaaagctttttatccatggaacagaaaatagcataaattatctcttgtgagtctctggttataatggaggcaatagagaagggtttcaggaaaaaggagaagtgtgagatagaaaaggcttgagcaaaatggtagcgacctaagtgatcaatgaatgacacaaataagtatggaagtgtcctttatcacatttgtaattacacgaatcacgtcaaacaaaacaaacacatgcatagtaagggcataagcacaacatttcaaaagcacacaattcgcaacaaaaacagcacgagacaggattttttttttttttttgttaattagatccaattctcgaggtctaggagcagcaacagcaatagtatagcgttttactgttcgattgaagttcaatcgcaagtacaccgcgaaaccgagcagattgaaaacagcggttacagaaatccatgcgaaacgaaaccctaatttgagaagcatgcaattaaacgcttgcgaggaagtgagagagagaaggaaggtgtagttaagttacctggcagcaggtgttggatcaacggtgcctcctgagctgataacctcttccctcatttctcgaattccgaagcatatgaaaatgaaattgaggagtaagtgaagaaacaaagagtggaaatggcagcttcgagcacaagtgtcagagcgcgtggacgccactgcgaatattattttacgatgccaatgcctgcgcctgcattattatttctatgaaaaccaatataataatgttaaatctttctctaacattttttactattaacttttttacttgttaaataaaaatattaaatatatttgtattttaaaattttaaataccactactatattgttttatttaatgtttttataatgtatattatatataatacatgaatatttttaaattaaaaatataaataaatataaaaataaaatatcatctttgttgaataatgttgaaattacatattttaagtataatataaaatgtattctttattaataataaaaatttatttatcacttgaaaataaattaaagaatatgttataaagatctttataaaatgagtgtatttttgttttgggtccctataaaaaaaattatttaatattcatcatcgaaaatttggagtattattatttttttccctaaaattcattttaaggtatataatataaatataagtaatattcagggtttagaataaaaaaatagagatatcttacgttgacatggttctattagttaagcttctattaaacacatgaacagttaacactaacatgtaacaataggaaacaaaaaataattatttcataattttgaggaatgaaaatcaaatatattttttataaggattaaaatcaaaatgtactctctctatacggtgaaagtgtgaaactataaagtaatttctttgaactaaaaatattgaaatttgtgttaatttgtatagagtattgggtttaaatcttattaccttaactctcatcattgtaacgagatcttgatatttaatttaaggtcacataatcttaatatttaattatatatatatatatatatatatatatatatatannnnnnnnnnnnnnnnnnnnnnnnnnnnnnnnnnnnnnnnnnnnnnnnnnnnnnnnnnnnnnnnnnnnnnnnnnnnnnnnnnnnnnnnnnnnnnnnnnnnnnnnnnnnnnnnnnntaaatttgatgcacgggtaatattattaaagatttgatatttaaaagtcacataattatgattcaaatatacatatacatttaatacacatcgaccaaaaaataaaaaaattgtgagagctaaaacaaatataagatcctaccagcaaattgctttcctttttaatgtctaaaaatataatctttaactggaaattataaaaagaaaaaaggtatcaatatgcctccacaaattcaattatctacaaggaattctgatagtgtcaaaagaaatcaacctagtatatacttcgaaaaatggccatgaagcttataggccctccgtattacaaaaagtattaaaaaaaaaatagccatgacagagtgcttcaatccattgttcaatgaatcaaaaactgtccactctcagcaacatgaataggcgtatgcataaaggccaattatatgtgagaaacaaattattttgcacttgatgtactcgcacctgcatataaaattgagacatacagcatattagaagttttgttttgttttttttttttcaattatcacacacattcacactaaagttaaaatttatagcattatgcattcttctaaaacctcccatcactaagctgaccctagtccctaggatctagagcacattagaagtttaaatgaagagaaaagaatacttaccaaaaagacaaaaaccattacacagagaaaaaagtaagattcagaaaaacatattactaccaaaaggtccaaaaccatttcatttttgtgtcattatcaaaactgagtaacttaccatctttttctgcgttgacaggctcttctttccaaatgatatcttgcagcccagcagagagatccttacagaactgcaaacattaacaatccattccactcaagttaataaacaaggtaaattatttatcataagaaaaacacatggagagaaaatgattcaacatcaaaatacacccttgttcattaaggtttatagaacttacattttcaaatttcagagtatcccctccagtctttcgaatctcaaccgtgtgaaagggagggtctgcctcagagatctgaaaaacagaatttataaaagcattagaaagtaggaatctctctagaacttaaatcttcaacctgaaaaacatgaaccttagtggatattgatagacgacttttgcgtcgagctagttccccttcaatactcaactgagatgcacaataagaaatattatcataagtagaaacttgatagcaagttatgattattactgctacaaattagcactgacaaggattctggctaggttgcaagtaatattattattttgaaattcacatgcatgagtgtgttagagacaaaacttcttaccttatagtttctcttcttaatattaaaacccatagacgctgcactactttcaattcctgaaactatctcattcgcagaacatttggatatgaaacttgtttcccttttagcatgcgcctaggagtcaaaaaattgatcgagttatcttaattaaccaaatggtcaagaacaaattcagaaatagtgtcactgataaacaaagaatttttttttatgtgaattacttgaaacaaagtctcgtgaatttatagtacagttaaatccggtaattttagggattgatacggtaattttagggattgataaacaaaatacagtaaatatataatgttttgacagaaggtatcatctatttacaagaatatcaaaaggaaaatgaatatttaattaaaggggccgccatagttagagattaaatttagttttttgttcttcttagtccattctatatcaaattatccttctattataaatttaagtccttggtcttcacagaggtattctctatgtattcatcttatatagttacatatgattctcatcttgtgacatgtgttaaatgcacattttttcttgaattgttggttttaaatctttggaaaccagattaaaacttttgaaagacttataatataactaaattgaaggtttctctgtataccttcttgaaaagatttcgaacaaggctcaagtgattagaatttttgaatgcattcctagtcacagatgctgaaggccacgcctcttgcccctccccaacaacattttttgaatcctaagcacaatatcaagcacattgtcatcaaagatagaatccaaaaggtttttcagctgcttcactgaaaccagcacttacttgatcagaactaatattttcctggaaagatctaacaggttgatgctcattcttgaaccattcatcctccaagatctcatcaattgtaatccgctgttccatgccatcagaagaggtgatatatattaacatgttaatttcatgagataaaagggaattgaaataaagaatatttgctataaagtaaaaaccatattagtatatatcagggctagctcaaccaaattaaacaagaaacatgtcaagtacttactgtagcaggacttggatcaaggattctcttaattagtctcgttacacttggagaaaaaaatgaaggacaagtgaaatcagcctgccatttctgttaacagtaaatttgaaaacaggcagaattcaattaattataaatcacaagtcagcaaagaaagatacatggacaacaacttacatggcagctcttactgaaattatttgaattttatcttgagtttatgattggttgtattcacttgtactacataaagcactatattcaattgctcatgatagaattgctcagtgctcagatatcatgagttccagagtaacagataaatgtgttatgttatgcacttatgctaaccaacattagcttcagaaacatttagtgagaattaccttaaggtataaagtcttaatgtctttatcattgaagggtaaataaccggccaatagaacaaaaagaataacaccacatgaccatatatcagccggtgcaccctcatagccagtgatgattgccacctatatagtatatgataagagacagcagtaatattattaattagcaagagagagaaactgaatttgaagtttaagagatataatatatagtatacctctggggccatataatgaggggtactgcatggtgtgtgaagctaacagtaacaataggataatcaattagaaattggacataaatgccctttgaatttttgaaaaattagtcactaataactcactggaacatgttgagacagtggcgtcattccaaaatctgacactttaagcacccccttagcatccagcaacaaattctctggctgtaattaatagataattaataaaataaatgttaatgaacttgttctctcttttattttttaaaggatgggaaacaaagtaagggacaacatatatattaatgacataagccccagcacctcactactcacctttaagtttccgtgggaaatacctctactgtgacagaaagccacagcacatataagctgctgaaaatattttcttgcttccagttctgtcagtgacctgctgtttgtctggcacagcaaaataacaccaaaattgtaaagagtgaatacaaatattgtagaggatttttatcccaattgatgcgaaaaggtaaaagagtcttacgattttatcaaacagttttccaccagttacatgttccattacaataaacaactttatttcggaatgcatcacctacaccaggaataatgcatctatataagctacttgcaatgaagagagagaagtaaaaaaaaattatggcaagggaaatttgaagataagagaattaaatctcgccatacaaaggaagtaatttccctttccttctaacctcatacacatgcacgacattcgggtgtctaataattttcatgattgataaatttcgatttatctgcaaaacagtaaacataccagaaaatatcaggtgagagtacatggtatggtattcatgtcatggctaaataaaaaaaaatgcattatatatactttttttttaatgtgaatgaacgtgtgcatgtctcttgaacagttaacacattcattatatataaactctatgaaaatattaaacactttttcgtcatgatattgactttaatatttcatttaaattctttattttcttctttctcaaatttaaaagtcaacaagaatggagattaaattaggaatcacacggtttacaatcgtaacttgtaaacaaagataagatcaatcttaatttttcgtatctaatttttcggctcacctataatcttctctatcccttccatatcaacattactctacacatttatcacatttttacaaccaagatcgagagattagaagtattaattcctgatcctcataaagtacgtacgtccaaaacccgtcataattaaattaaatatatcatatcctctattgtaaaatatgccatgatatttgaaaaggatgaaaataataatgtaatttaaatctgaagtggcataaagttttgtattaataatataaaccaaaaaaaggtatagaatatagattaatgaaatgagaatagaaaagtgagcacacacaccacgcccatgatttggttgcagagaagtgtgtgtttgtggagcattttgatggctacagtgtatccgttgttaacgtcacgtgcaagcttgatcatgcagaagtttcccgcgctcagggtttgacccagttcatatcttcccaaagaaaatgaatccgtcatcttcttcaagtttctttattcggatctttcttcttgcaaccctagctagcctcgttgaaaacttaatttcttgcaaccctagcaaactttgcaggtcaagaattaaaataacaaaatcttgtttgatggaagaagcatcaaattaaaggacgctaaagttgaggtttgcactatatgcatgcagaaatgagagcacagcagaatacatatggacttgaatggttgttagctagttagttattacagactaattatcaaagaactagttattaattacgacacttcttttcttaataaagagctagagggtctttttttttgttgttgttgaagattagaatatgaagaggaaaattgaagacagagaaataaaaaaaaaatgttagtatttgtatgatacattttttagtgggggttgagacaatcaacagaagagatttatgtaatgttatgaattacaattaaggagaagtatttactttcaattattatgtattgaactgaatatattgtatttcaaggagaaaatatgtgagaataaaaaaataaaatataattttataaaaacttttacttaagagaaaaaagtgtataataaaatagtatatataataaaaataaatagaaataaatatataaaaattagtatataaattttaaaatatatatttattggtcgatgcagaaaagtgatattttgtaacagttataataagaaaaaaaaatagactctaaatcagtgacaaatccaaaaatatttcttaatggtgacaataaacagtttataatatttttataagagaaaaatatattatgaacttttatataatacatagtattatgataaaagaaattcaaaatatttaagttatgtgtggatgtccattaaagatgctagatcattaaaaaatttaaaataaaataataaaactagtatcaatttattctttcttatattttctacattcattttaacaataaaaaatatcttatgatgggaaaaaaatattatacaaatacaaataaaaaaaaaaaatctttgtgggacaattgccccacactccaatatgtggatctttcactgctcagaattgtgctaaagaaacgaatttcatgagaaattttaaaatataagttgaaaagtgtcttgaaatgtaacaatatatacgagtcttagaatttcacccatctttttgtcttattaatttacaaggactaaacaagttgtgctcaaaggagttgtgagaaaagatggtctctatcagttgccccaattgtttgcttctgtgccttagtccaagagttttacaaatgttttttttattatctttaattcttctaataaaaatgttgtaaaagttcagttgttaatacagtcacttgtaatcctatttattttgctacttggcattctaggtttggtcaccctagtgttgatgctatgaaaattgtatttcaactttgtaatattctaaatattaataaaattcctatagatttttgtagtcaatgttatattgggaagtctcatgcctctcttccttttcttctaacactgtctatgctaaaccttttgatctcgtttctacttatttgtggggccctacaccatttccttcaccacctagttacaagtattatgctacttttgtggatgctagtatcaaatttacttggttttatttgctcaataacaaatttgatactttagaaacttttaaactcttttaaactattgttttaaatcagtttaattcttctcttaatgttgtttagtttgattaggaaggaaatttcaaatcctttaccaagttcttgagtggtcatggaattcaacacaaacttatttgtctccatactcaccatcaaaatggtgtagtaaagtgcaagcacagacatatagttgaattgggtctcacattactttctcaagctgagccacctctccactattgggatcatgcctttgtttccaacatctatttaattaatagattgcctttccttagccattaatcatgaagtttcatatcaaaaattgtttaacaagtaaccatattactaatttctaagagtgtttcgttatttttgtttcccttttctcagaccttacaataagcacaaacttcaattcagaacttaggagtgtctttttgggctattctccttctctcaaaggctacaagctagtgtcttgctactgatggaagactatacatctccaaagatgtcataatatgatgagtgactcatttaatgattctatgataggttttgatatcatcttaaaatattggtttgggtctaacttaactcaaaaattagctcataggatgaaggttgcctccacttatatattttatctttatctcatgtctagtgaatgtgaaactttgattttttttctaatagtgaataatatttaatttttatataataatatttacacattagtggtttatgcttaacttgtggataacctagtaataattaaataataagattaatttgtctcctgtaatttgtaatatgtagttttggtttcttttattttattgcgctgatatagtcctttaaattttaaaattaagtcattaatttgtattgtcgttatattagttgaccctttattcatcattttttccttgatgttgattatgatttatgacattgcataattatggtgtcagggcaagtgacatgtgattttcattgtatagcttttaatgttgactatattaaagtcatttaatatatttatgttaaaaaaaataaaaaaaatgggacacattggagaatccctagtcgaagaacagaaaaacagttttctcctttatctttgagacacacaagtataggaaatgtatctaatttccaactacacttgtgtccactcccataggaaatgtatctaatgagagggttttttatgattaaaaagaaaatttgactattaaatcgaattatcaatattaaaatatataattgatgtgaatttttttatatcacataactttttttaaacaatctttttcataacattaaattttgattatttatatataattgtattttcaatatctattcatttcactcataaaaaaaatatcttgatatcttactagatatgtctcatgtaccaacaatgattattaaatgataacaacttatattattctttaattaaatggttcaaggatcaatttttagttagtcattagatatgaaattttgttaatagtaaaataactaccttatatctattcagagtttcgaacaaaaattagttattgttttcgatggagatacttcatatcaatattataattagaagaacaaaaatgtctagtggggtatacatgttacattaaactagtaattttagaatttaaaatattgatattataataagtaaaatttatttaaaatattataaattgagtgttatttataaataattaatatatggttggtaaaattataatttctgcggattcatttacacctctaaaatatggtatggtggataactctttttagagattatttttttaattttcggagattaattgagttggttataacttaataaagttatatttagacttatcatataaactaataattatttggttagacatttgctagttgatatnattcgtttactttacatctaaaatatatggtggacaactccttttagagaaattttttaattttcggagactaattgtgtagttataacttaattaagttattatataggcttatgatgtaaactaataatcatttggttagacatttgctagcaaccttaagcacgcccattgacatgttaccgatacctaatagtattggaagtacgtactcttcgttttactaatttaaaaaaaaaaacaaaatcataattattttaatagagacaaagtcatgctttttcaggataaggtaaaatcatggttgagttgtatttttaaggtaattttgagttccaaatcatgatttgaataataaaaaattactttcccttcaaatctcatgatttgttaattatgattctaatacacctttaatatgtcatccaaaaaatataagggagagctaaaacaaatataagatactaattaagcctggcaattttttttaacgtctaaaaaataaaatctttcagtaagggtatcaaatatgccctcagtaaactgcgttaggaacaggaacaggcgcaaatagtatgtgacaaacatgttatgttgcagttgatgttgatgtattagcacctgcacctaaaattgagacaaacaacacattagaattccaaataaagaaaaaaaaattgttgaatcaagtatataataggaaattaagtccttaaaaagaacttaaaagggacaccaggaaaacaaagaaacaaagctatcttaaccaaccaaaacaatttcatatgtcttctccactttctacactccatgcatatataaaggcagagtcactacattttttttttttatcaatggaaactcatctcatttcattattgataaattcaacaatacaattgggaatcatatgacagataaagggactagcattgtcaatagctactcttgccaatgtatgagcaactgtgctagcttgtcgtctaaccaactctactcggtaagatttagtatattttgagcacctaaatactgtctttaatggcaatactagtcattatcgacttacccgggcctgcaattaatgtactctcccctgcacctaaaattgagacaaacaagtgaaacaacacaatattagaattccaaatgaagaaaaaaaaaataattgttgaaatcaagtataggaaaagaacttaaaagggtcactaagaaaccaaagaaacaaagccatcttcatcttttaaccaaccaaaacaagttcacagattcagtacattttgagcacctaaaaactatctttaatggcaacacaagtcattattatattgacttaccctttataatcctccaaagtaattttgtattttgttcctttatatgattaaactttgagtatatacagtttttttattataatactaatcaaaagttttcatgcagctagctttagtaccaaagcaatttcattctaccccatctgagggcatcaacaaaggccagagtagcagaacaaaagtataagtgcatgtttatttgaacttattttgatgaaataattaccattttatataacctcaaaatacttaaatgtagaaacagttatttaactgaaaaaaataaggttcaaaacaacaaactaccacctaaaccatttcgttaaattgtaaatatcctctctgtgtcacctaaagcaccatgacttatataccaaattaagtaactaaccatctgtttctatgtccatagtttctgctctccctttccaaataaaatctggcaacgcactatatatatgcctgcagaactgtaaacataatttaaaaaaacattaattagaaaatagtttattataagaaaaatgtatccttgtccattaaggtttatatagaactcaccttatgaaattccagaacatctccttcaaccttccgaagctcaaccatgtgaaaaggttgtgctatctcataaatctgaaagacataatttaaaaatcattaattctagtaacatccctcactagtaacttaaatcttcaactgaaaaacatgtaccttagtggatattgatagatgacctttgcgtctagcatttgcccctccttcaatactcatctatgatgcaaaatataagaaattagtactggctaagttgcaagaatattattattttgaattttggatgcatgcgtgtgttagagacaagaataaacataattcttttacctgataattgcttctcttcttaacatcaaatcccataatcccagcaacacgctcaattccaacaattatctcacccacggggtttggggatatgaatcttgtttcccttttaacatgtacctaggtgtcaaaaaatcaactggtcttaagcaaatcgtcaagaacaaattcagtcacataaaatttgagagaagatttatttatgttcgatagtgtcactaataaacagagtctattacaataagatcaaaactcaaaaggaaaacttgaatgagtttttttccttttcatgcgaatgacttgaaatttattatagtatattacaacagttatatccatttcagggattgattaaactaaagatagtaaagtctataatctgttttcctgttctatttatatgaggtttaatctatttaatttaaaaagtctttaaaagatatttgaatttacttttttccattatccttaatccattcaatatcaatttatcatgctattacaaatttaagtccttgatcttactctctccattgtgattcttataatgtgacacgtgttaaattcatattttttccactctttatttagttattaatattaattaatcaaaggagatttttaatttaggttttcctttctctaatatttttagtcaatgcttaattgttttttaaaatttatattttaaaaactgtatttaactaaattgaaggtttctttgtgtaccagatggttgaaaagctttccaataataaggtagtagcccagaaatgtattcaaaatctcgaacgcgttcatgactggcactggtgctgaagaccatgcttcatccccctcatcaagaagcttttgtgaatcctgtgcaccaaataaggcacattgacatcaaggttagaatcattaatcatatccaaagctctgctaagcaatatttactcaagataaaaaattaaagcaaaagttcttacatcatcaaaactaatattttcctgggaaaatctaggaggctgataattcctcatgaaccattcattctcaaagatctcatttattgtaatccgctgtttcatgccataagaagaggcgatatagtaacatatgttaattttgtgagatgaattagggaaacaaagaatatttgctaaaagccatatattactaacatggctcaaccaaattaaaaaagaatataacatgttaagtacttactgtagcagaattgggatcaaggattcttgtaatcagtgttattaaacttctagagaaaaatgagggacagatgaagtcagcctggagaatctataagtcacagtaaatttaaaaacattatgaggaaggattcaattagttaaaaatgataagaagaattctcactgaaattgtttcaattttatcttgagtttttttatactgattgtacttgtaaatatataaattaagcactatacatgctcatggtagaattgcttagatatcaacagtagcataaaaaatatacgtgttatgccaaccaacagtagcatcaaaaatcatttattaagaatcaccttttgaattgtaacattgtggtcgttattttcatttttgaagggcaaacgtccagcaactaagaaaaaaagaataacaccacatgaccatatatcagcctttgcaccctcatagccctgattcgataacacctatatatatatatatatatatatatatatatatatatcacaagagaaattaatcagtaatcttattagagagaaactgattttgaagtttaagaaataaaaaaaagaagctaatatacatacctctggggctgtataatgtagcgtaccacatcctgtgtgaagcagcccatcttgctataatattaattaacaataagataattaattgccaacttaacatatataaacgccctttttaatttttttgaaaaattattcaccaatatgtaactcactctagcgtgttcgggcagtgtacttaatccaaaatctgccactttaagcactccattagcatccagcaacaaatttgacggctgtaatatatatagtaatcaataaaatgcatagtaaagttaataatgtcaattaacttgctgtctctagctttttgaatagtaagtggcaaacaaaggaaattaaggaacaacatatgaatgatgcacgatcactcacctttaagtctctatgagtaacacctctactatgacagtaatccacagcacatataagctgatgaaaatacctttttgcttggctttctgtcattcccgatcttccaggtaggcctgactggtcctgaaaatgttgggctgtaaagaggcaatactaatattgtagatgatattctgatattacaaattaaggtaacattaatgccttagcttacaattttatcaatcagtgttccaccaccaattacaagttccattacaatatatacccttgtcttggtagccatcacctacaacagcgaataatgcatgcatatataattaagggaaatttcgaagacagagaaattaataatcatgcaaaggtaattaacttatgcacgcaagcaatatatatataatcgatatcattccttctaacctcaattatacgcacgacattcgggtgtctaagtattgacattattgatatttctcgtcgaatctgcataacggtgaacaacagaaaatattagtatatggtattattttttttgtagtcaatattattatatggtatgtttcaaagactgaataaaaatgtattttacatggattagtttaatgtaaacgagaaatgaatgtgtctattcttctaattaatgactcttggtaccactaacaaattacatatatattatttaacagttgatacttatgatcaactttgtgaatacttggtcatatatattgacttaccatttattatactattttccaaatttcaaaagtaacaattaatatatagagacgaataaactatagagatcatacacagtttacaatcgtagtttgtaaaggaagagaaaactaatcttaatttatcatatcttccactcgttaattaattatattttttaacttaaatttctttttcttctaatcaatataatacatatatatcactttcttttcccttttttttatcatctttcccactcacttgcagtacattaattaaccttacattactggaagcatgatgaacgcacccaagatcgagaggtacgaaataggaaatagtctttatcaaaagaaaatacgtcgtcccacccgtaataatcatatacacaataacatttaaaaaatgatgaagatgaaactatgaaggtttttgtgtgtataaatgaaatgagagagaagagagaattgagaagagaccacggcttcctttcgtctcctgaaatatttgttcttctcggcgagaatggggttcttgtcgagaattttgatggccacttcgtgtccggtggcaatgtcacgtccaagactcacgatggaggtgcttccggcacccagggtccggaggattgcatattttcttcccggaataaccatagttctagcaggttgtctactactactactactcctgctaccatgctcatacactgatagaggttgctccatcttcttcttctttctctatactttctttctttcttgcagaaaacgcgcagtaaccgattttccttccaacaataacaccaagttaactcatcacaactaactaacaattaacgggctaacattaattaagattctatttttaggtgttcttttttattcttggtattaaattgtaatgaaaaataattttaaaaaaatatacttttaaatattaataaaattaatgatattaacaactttttttatgacatagagattagttaattttgtttatatttaaatccaaaatgagtattacttagcattggttaggcaagcgagcaaactctaaactacaattttctttctttatttatttattttatatttcaaaaatgcttcatttttctcttaccttcactctcattctccatttccttttatccatcacaccttttgaaaatcatttcctttctccttgtccgacatttttctactagtagtaatatatgaatatctctccattataaacactccaccaataattatttttctttatttcttttcttataacatcgtaatatttatcacttttctcttttcttagttttttttatctcttaaataacatatgagcgtccattaaatatataaagtcctgtgaatttaaaaagatcttgtaaaaacattatcacttttaagttcttttaaaaaactattatgattaagattttgtaatttaaattttgataaatttataacatataaattcataagatttagaaaaactttatacctttataaaatttgaaagaatttcataaatttacaagaatttgatgagaaagataatgaataaataataaagtttagtagaatcaatacaattttttaatataactattttatactagcttgtcttcttatgtctatgcattggaatatttttggaaaaaggtgggggagaatccacgcattagcagattgtataatgaaataatttttttaacaacttttatagtatctttaactgaaaataagagaaagaaagaagtggcaattttggatatagcttcctggctatcgcaacctaaatgaagttgcgagatgaaaacgatgacaaagtaacacaggtaaatcctattctttccgcactaataacaccaaatgagaaatatttgcctatgaaacaaatgcataaaacaacaatcttcgtataataccattatcttttttttttttttcaaaaaccaaaccaaatcaaaagaaaaggaaaattaaaaaaaatacaacgagcaatgggaaccttgaacctaaacgcagtcatgatcaaaacaccaatcagagatgaaaattgccatgctcaacctcaaattcacaatagaaaatcatataatgatatcaataattaacttaaccatagcaataatcccaaaaacaaagaaatatttttttattgtagaaaaagcttatagtgttactgccttcaagaaagagagaaataattatatgcgatatgagaaagaaaatattgggagagaatagataagtctaaggggaactctccaagcaattaagaagaacagcaacagaagcttcaagatgagcaacacactgtttgcactcactggaaagattgtaaaacaagcagaatgcaaaaaatgtggttaaagttcaggattataataaaaaggtagcagattgcacacagattccatagcaaatttgtcatctctagtcgaatataatacggcaagttgtactgtgttcagtgatttaaaagatagaaaaggaaacataccttggacgatgcaaaatagtggtacgtatacaatattttacaacacatttcaaataggctaactaagaactggtgatgtacgtgacagaaatttctgaaatcatcaatttctgaaatttcagatatgtatgcattgtcctattcaacattttgcatggatttgatcagacatgcaatatgttgatagaatagtagcaaacaatcaaatgtaatcagtctcaatttgatagaatagtctcaaattgagaatatttgaaattaaataactaaattcatatttatcaactttcattgtttaaaaaatgtaaaaatattttttttgattttttatattaaatattaaatgtgatatctaatcaaatttaacatatatgaacatgaatataatattataccgatttttaatcatttaagtaattttacctttttttcaattaattcacttaagtttattttcaatattatttaatttgaatataatgttaaattaagtttagtgttgtgaacatttgaattgattttagattttttttcaataatataaaattaaaaaataatataattttatatataattttaaaaaattctccctctaaaatcaactacaatccagactacaaaaaagatcgcatggatgaaacaggatcaacattatgattctttgctttctgctgatagctttttgcaccatctttgcaacgtatttcactgattgtaactcaatattcatttgcacaaatttgatatgtgattcctttcttaatattaataagctaagttggtgcttatatgaaacgaaaatttcattgaaaataaatattattcacacatatcaaaatctggttcatatagaataatccaacggtccgaattatctaaatgacacgttccatgttaacctaaagatatctaaatccattccatctcattcttatttggagtaaggattttgctaacttataagttactataacctatgacgccgcattcacatatatatacctcaattaaatatcactgtttattaatttaatcatttaaaaactgactaatttaatagattttctcttctactgtttcttctcacagctactcctagtcattcaataaatcaattagtgggaactgaaaaaaaaatatttatttaacttggcagtgggggtgggtgcatgtaaaatctgctattttcgacagaaatatatcaatttccatttttataatgcttgaaaatacttctagaaacaaaattgttaaacgttggtggctaaaaaaacagttgacgaaacatattgattattgaataactaattaaccacttattacaagacttgaatttcatcatttcatgaaattatacttcttgttcttaccaaagatacaacagacacaagtgaagtgaccatgaattaaaatttatcgtccatgtcttcacttttggcaacataacaaggcagttttttgagtttatttgatagaaaaatatgagcctgtacagcaaaattcaaattaagtgcaagctagaattcccaatccatgagtctctttacactcccaaactcccaagtcccaactattcatgttcatcaaacccattgaaaggatataaataattacctaaacaagaggggcaatacatgaacaaaaagatactagcttgcagctttacatgactcttaaaaaaaaaaaaacccaccaaggttgcatgttgtttcatttccctgcctcatgttctgccttcactgattcataatggagagggatctatgcacttccttcaggaagtaccttcccttaacgttggtaatagaagcagaagcagatgaagctgcaactgctactgctgatttgctttttttagggggtgacatgacagaatcattggtgctaatctccctctcatcttcagtaatagtgtccaacatctttgatgttctgtgcctcatcacagtaacatactgcggtggtgccacctccatgaagaacctagcaatgcgagaatttgccatttttgtgaaagtgctttttgtaaacaaagtaaaagctaatagagagaaaagtactaggatttcaagttgtgctgaaattggtttgattgttgatgatgggaatgaactacaaagggttcaatttataaggagggggactaagccaaagagttagtatttaactaggctaaaattgagtcaagggtcttaatccatgaaggttaaatcaagttttattggctagtgccgccacaagcttttgatattaattgcaatgcaatgctactttccttgtagataagcttctagtaggacaaactttggtatgtgtcaacacgtgggtggaaaatttgatatccatagagatatggtttttgtcgggaaccgtgcttccaaatatacactttttggggcttagtgaaggggcgtgtttgtctgccacgttgcttggacggggacattacttggacatgggtgtaattgaagaaattttaatcatacatttgtttactttagggtggttggttttgccttccatgttacagtgacactgattattgggtcttgagttgcattgatattggagaagtttggttgaacgtaaaaatggatgccaagtgtagcatcatggtgaaatggcggtgagattccagatgacaacaacattaatgggaggcaggggcaggaggaggagcaatgttcttaaaatgttgtatcagtctagatattgattcagtgttttagtttgaattttagggaacacctttagcagtatagtaagattatactagtaaaagtgttttaagagttacgttttaattaacattaatatatttttttaattctcaatattggtttttattttacaagttattaagacaatatcttaattttaattaaaaaatataattacaaatacttatttaagagtttggagtattttgtaataaagcctcttaaaagaatataaatttatccttcaatgtgaccttgttaaataggcttttaatagaaaagtcttcacttagttaattttttttttaagtgtatgtggaatgatctctcctattttgcatcttgtttttaatccacctatgtgagacttattctccaacacatattatactaacatatatgtaaatctcctttttattcaatttaagagttacttttaataatgttaaatatacatgacttttttttatactgaaaatagaacaaggctaaaaatatttctaaaaaaattaatttattctttttataagggtttgatatgacttaatataaactaagtcataagtctttgttgaatgatctctcctatttctgctcctattttgtatcttgtttctaattcatcatgagacttgttcaattttaaatatatgtgtaaatttaagttacttatagtaatgttttaaatatacatgatttttttttactaaaaacagagcaggctaaaaatatttctaaaagaaaaaaaaaaaaaaaaacttaaacgtgaccatttgtattaaacctaatagcagtgcattgagaatcttatcagaggcaatagaaaatatctcgcaaactgttcagattgtggctttaattagcacaagttttatgttgtgtatgcatagtccacgacttcaagggactaatgtcaaatataatggcaagtgaagataatggtggttcaacttgtggacacattttcttcattatacttgaacaaatacaaacgttctcaaccattttttttttcgtctctatatttgttatcctatatttatcaccgaaaaattgagtattccaaacaggtaatcttaataaagtgtttgtgtatgaatgtgtctaagtaggtgtcattaaaaagaagagataagagaagagacatatcaccaacttgtgaattgcatcttgttctgttcttttggttatatactgctgcgtaattctgatatagcatatattaacatatattttgttcagttcggatttgattatttttatccaaacctgaaaaccatgaacaagaaacaggaagcaaatctttgaaaaacaaaataagactttgtgttttatttcggtttttccttttcttatacaaatattagaaaatgtaacnnnnnnnnnnnnnnnnnnnnnnnnnnnnnnnnnnnnnnnnnnnnnnntttatttcggattctctttttttttttctatctcaaactttaagatttctagaatgcactatttaaaaataacttttaaatttaaagattatattacaaattacctttaacttaaatttaaaaatcttatttttttaatgtcaacttaagaaaattttttcaactaaaaaaataagtttttttacagaaaaaaatcaagttaaatactacttaaatcagcaaataacgaggatttgaaaatttaaattcaaataattttattgttacgcgaggtatcaattagatgagtcaactttcatttattttagactcgaacttagaaagaattttaagttttaacttttcttttgtgaacattttttttataagtttaccgttttttatacgtttttggtgaatattttatgtttagttaactaaagtattattaagtttcttttctctctctcaaattatgttaatttcaaaataaatattagcttattaattcttttttaagcctatcttaaaaaagtttatattaatcacactccttctaatatctctaattttttatttctcgacgattctcacactacgacacttcatatagtaacatttacacaatatttttgttggtcaaaaccctttactaatcagaatcctacgtaaatagtcattttcaagacctcgaaaatgagaatcgattatgtctatttctaagatcaatgattgatcccacaaatcaacatttcagtgtgttttgtgctcactcatgtttttcgaaaaactttctagaatctcacctattccataactactccaagcaaatacgtttaacaatagaattcttatgttatagactaccgaaaagtagatatatcttgttagtatagatagtaccaattaatttatttaagacattctcagttgtatagtctcatatatgcacaacctctgaatctctctcttttcggtgtgattcgtcgaggtgttatatgttcactagtttccatatggttcattctcgaaccataccctaataggagagaggtttgctttaataccacttgtaacattcttgattttcgatttttccacgactcttacattataacacttcacgctgtgacagttcactcaatatccttattgatcagaacctttcatcgatcatttgtaattcattaatataaacataatattcatatttatttgtttattttgggtaggggatgttgaatagttcctcgtgaaggacccaatatggcaatatgccacttgcatgcaagatgatgcgcaacatctaaatcactttcctcaccatcatagctaccgtccatggcttactttccgtatttattccaatggcgtgtcttccagggcagctacagttacagttactcaatcaccatcataatacattgtggtggatacacgttagtttttaaaactttttaatctaataatatatcaataataatccttcacaaaaaaatatttttatattattgtttatttattaatttatagtgaaccgcattaaaatattttgcaggatatataattttataatgtcatatcaatatattgttcctactaaaaattatacgtgcatatactatattcgagcaaactcgtaaacacttttatagaattaacctaataataatattataagaattcttcgatcccactagcttctcatatcacatggagacgaatactcagaaaaggatcgacgtgaacgtacgtggtggaccatatataactcttggttattttggaacggaagtggcactatattgtaagaaatataagtacgtccatattctggataaggatgcagaacagcccaacatgcttattctagataatattttcccgtgaacatgtgtgttttaattggctgccggcataatttcggttggaatatacatgcagtattgtatatgtaagaattgagagtgtgagatgagtgaatctctgttatataattcacatatatagatgattaattaatataaccaactgattcgacacaagttattaaaattattaatgaacttttgacgtcaattacctgtttgtcttaaaatatcttagcatttgaattcttgacttattacttataatatattcttttttactttctaaacaaataatctagctagggctttctctaacactccttaagtttaactaaaatggtgtaaatgtgatttatcttcaaacttttttcgtaaacttgtagttcaattttgggtcttagaagccataagtcatgttttgatcacatgatgttttcccaaagagttatgttatttcgtatgaatcatttttagtgcaaattatcagattaggccggaaggatttacaaaggagaaaatgcctaataagagtagctagaagcacgataattgatttatgataaaattatatgtatatatttatttataactcatgaagagtaggcaactcattcttatccaatttcgtaaataaaattttgacgagcatttcgctttctcaaatatatggtgtgcatgaatcgcgggtcttcgaagtttgaggaaaaattttatatttctttaaagtgaacaatgtcaaaagaagctttttctccataggctttcccataaatgtaaattgttcgtattcaattcagcggtgaattaaggagatgctatatgtagtcaaagtccaaagaaattcattaccacacaccatcattctacagtaccaaaacatcacatgtgccgtattaagcagggtatacaataagagagaaaaagacatcacaagttgcagaaaaattcgtattattgtaagcaatagttgcaatcagtcaggagtgtagatatggagtgatccccactaaatgtgaaatgtcgaataataagtagaaggggagaagcaaccctaggaatactgccaaacattattacatttaattcataaagcaagttcggctgtgtagccgctttatcctgtgtcatgtctccaacactgatccaatacaacaactatgcataggaaggacaaaagtctcatttatcttgcacatcaactatagtcatgcatatatataaagatataagtttgaatttgttttactagcgtttataattaaaaaaaacaaacaaactattttttgttgataaaaagaaatagtattcatgcatgtattctagttctaaatctagctaggacaaaatagtacctagaaaaaattatgaatgctttgccactttaagttgtatcattagtctttaatttgatatagtggaaaaatcccaagtttacgctgattataaataagattaaaatattatatatatatatatatataaggtgggtattatgatctattacatattcaagagttaattaggattttaactcattatatatataggatggttaactaactttatatatagctagtaattaaatagcgagtgaaattgtgtgcgaaagaatattaattcgattttattatatgaatgaaatttctaggtgttctcgagcgttcgttgtttgttttgaaagatacaagaatctctttagctcattctgtaacaatgccatcaaagtgtgagacagtgagagaaacaatttcattttattattcaaaagttaattacaacaataagtcaatgaccttttcttaacatcattcttacgtcattttttaaagaaaaacacacattctacacattcaattctgtcattatattttttttttatttccaataaaaatgttgtacgtaccaatattaatcagcatgcaaaaaatattaattgattaagatgagaattttctgtccgaattaaccttaatttgtttatacgtaggttggatatatacctctttcttgaaatttagttaaatcataatacattcatttattttgaaannnnnnnnnnnnnnnnnnnnnnnnnnnnnnnnnnnnnnnnnnnnnnnnnnnnnnnnnnnnnnnnnnnnnnnnnnnnnnnnnnnnnnnnnnnnnnnnnnnnnnnnnnnnnnnnnnnnnnnnnnnnnnnnnnnnnnnnnnnnnnnnnnnnnnnnnnnnnnnnnnnnnnnnnnnnnnnnnnnnnnnnnnnnnnnnnnnnnnnnnnnnnnnnnnnnnnnnnnnnnnnnnnnnnnnnnnnnnnnnnnnnnnnnnnnnnnnnnnnnnnnnnnnnnnnnnnnnnnnnnnnnnnnnnnnnnnnnnnnnnnnnnnnnnnnnnnnnnnnnnnnnnnnnnnnnnnnnnnnnnnnnnnnnnnnnnnnnnnnnnnnnnnnnnnnnnnnnnnnnnnnnnnnnnnnnnnnnnnnnnnnnnnnnnnnnnnnnnnnnnnnnnnnnnnnnnnnnnnnnnnnnnnnnnnnnnnnnnnnnnnnnnntaaaaatttttaaaaattgacctgatgactgatttggttatgatattaaattattagatcagtgattgaatcggtgaatcattaattgatttgtattatcctgtttgtaataaaaaaatattaaaaattgtatctatcttaaaatcttttttataatacattgaaatttaaaaatcttaaaaacataaatgaaatataaagaacacaagttaaaaattattattatctttaacatttaatatcaaagggatcaatgaaaatatatatcaatattcacactaaagtgaaacaaccatatcatatcaatgtaaattaaaaaaataaaaaaccaatccaaagtttcaaagtccaaaccatatttttaaaaaatgattcgggatcacaatttcacatgcaattcaactataattgcagtcacttctaagttaatttaactcaacaaaaatgcaattgcaaccacaaaaaatatcaatacaatgaatgaaaagatcaatttaactcaaaattataaaaaaaaaattaaaataaaacaaaatgaaaaaaaactaaaataaaacaaaatgaaaaaaagatacataacccgattagagtcaattggtcaccgcggttcaaccacaaatctgatcgagttaattcggatcgctccaggtcaaaaaatttaatcaaatttatgattcgactcaatccaatcaccggattatgattcgaccattaggtcctagttttaaaactctctttataggtatccctagtatctattcttaattaaatgtttcttttgctgataaatttttttactgtgtcggaaaatattcctatatattagttgtggatgctctatttactaataagaactgaagaagatatatctgtttctctttctcgtgtcagatacacaatttagtcttaatttcctttttaattatatgaattaaggtatgttataataatataatctgtatatcagtaactacatataaacatttttatttaattaattaattaaaatgatctaatcatattattaatttaattttagttttttaacaaaataactggtattcatcttaatatttttttcaatttaatcctttaatttatttaaaatcgatattgttaatcatttataaaatatacattttcgcttcaatttttttcctttcacttcatttcctttttaattaaaaaaaattcttaaattattatcaacatcaatcttaaataaaatcaaaagattgaattaactaaacaaaataaacaaatcgtcaaaataaattttttaaaaaataaataacaaaattaaataaaaaataaacaaatgacaaaattaaaataaaaaataagataaatgataaaatacaccatttgtccctttacaccctgacgtgcaacttattcgaagtttagtctaaactatcgtaggatttacaccgcaaaagtacgtagggtcatccccttgaaataatagctaagaatcaacatcagtcggaaagttaaaagtggaaaaaggatgggagccggggactatcatcacatccactttttgggagaagtaaaacacaaaagcttatcacatgcattaacatcaacttcacaacaaaaaatcatattaaaattaacaaaattatcttcacaaacattgatttataattgatcccagattattggtgttacatgataggctaaaatggcattattgaagttaatttgaaaagaagggccattttgattatgccactgatatataaataccatgtacatatatcacctagctagggtgacccgtgaccatataatcatatatccttctctaaaagcaagagtgtgtcagctagcaatagcatggcagctgaagctgatatcaatgttctgccacccatgtgtccatcaaacacagaaacttcaccactaaaaccattttctgcagttgctccgaattgtttggtcccattttccaagatacaaatcaaaataacattggaaaccatctacgaagaaggagaagaagaagaagaagatgaggaggaggagagtgaaatggagaaaagttctgagacgcatgcgtcctcttcacccccaatattcttcccaattattcaagctgctgcagcgacatgttcgtttgaaatcacagggtattttcactttttggtgtcgttcggtcataactaccagcatgcatagataatagtacgtggtagctagtccatatatatatagattctaatgtgatccatcatgaataatatttttgaaatttcatggttcatgtagaactttaagtgtgacttccaaggtaatcaactgtacattaatttgtcttctttttggcatatggttttggtagttaggttgcattcaaagttttaaaaataaaaataagtgggaataatgtacggtcaattgtcaacgttttaaattttgacggaaaaataaatattaataaaataattaattaaaaataataataaataaaataaccaattattttaaaatttaaaatagtaacataacattaatatttttattgaaaaataaaataaattatcaaaataaaacttttaaaaatataaaaaataaaaataaaaattttaaatttagtgtatcaaaataaaattttaaaaaataaaatagaacaaaagagacatttagttataagagaaaatgaacaacaaaagactttgagtttaataactacgcaatgactgtaaaatatttttatattattatctaattataaataattacttaaattattttaagataattatttaaaatttaataaatttataatatgagttgtgatttgataaatacgtaaaactttttaacttttttctcaaaagaattttattcctttaaacaaagttactttaagtttaacttacctcggattaattgaaacgaacgagatatataagagtcaaaagtaaaaacacgtaggttttattcttctttctttttatcagatgtacacatctatgacccaataatattaaacccggattgcaagtcacagctgtaaaatcaacaaattgtacactaataatctccaattctagaacgcggttgtgtgcacgccattttgctatttttaatacagcttctagaatggaaaaaaacgcttcgctgtgaaatctattgtctatcccattattccaagcaaagactttttcaagcatgagttgtcactagttaatttccaccaataattctaacaccttggccatctcccacctccttcgttagttgactcccccaacgtatatatggtagcactacccccttcttccaaccccaaccccaaccgattttcatcattttctaaaggttgagtttctttgatcaaagaaaaaggtcaaggaaatcaaagggttaatttggttataacaattattattattattattattactgtttctcaaatttctcaaattaaagtgttgatttgaaaaaggatatggtgaaggaagtgagaggcatccaaaagtactatggagaagttgcaccggccctcctcataactcctcataaaaaatgttcccttcgttttccaaggttggagccaatcattgaagaagggtctgatattcagggcctccagatcatgcctaaaaggattctttttcttgttcctgcattgatttcttttggcacatactacttcttgttgtacagcaacgttaattaattagtgcctgaaaaaaagaaaaaacaacaaaagttgatgaaacatatgttaattaattttagtgatttgcacaccgggaggggatgtgtgtaaataatattcattttatattattatcagtttctgctaggcatcatgcaccaatattaataacaagtggttcttttatttgtattttttgtttgagattattaatccattgtcaatattccccctggcctcccccatataaaaaaggaaaattcaaggagaacaaattaattaaccctgacaataatgcaaactttatttacaaatcctctctctctctctgatcgactgtatgtttatcatcatatatatggaatattctttggagatgaattaaactttaattatgtggatccagatactcaattgaattgctaggacctaggagtcgttagtacgcctcaagtttaccaagtcaggtctcaagaagtttccaaactagagttgcaaacataagtttgtttctatcgcttcattatgcatgcacacgcattagcaacggaatttctacctttcaaaaagtaattaagtatagttttttttttttaaataatgcacactactacaaaaaaagcctttcacgacgcacatacgacgacggttatatggaaaccgtcttagtatgctacgtgtaacgacccgtatgcatccgattcattaacattatcttatggtggttaagcgcagcaattatcatagataattaaaatggaagcagtaaacaaaaatgacgtcatcatacgtcattaacaatacccactgtacatcatatatggtgaatctcataatatacaaagtatatgtctcaaaattgtatatatccctcaagtctctaaaacaaaacataggcatgaaaatcaaaagatagagctaacatgctcttcactctatgcctaaggttctctcagaaccatatccctctactcaggcctcttgccctggaatctatcagctgttccctaagcttcacctacaaaaacataatccccaaccggggtgagataacaatctcagtaaactcagggttcttggaggtctttcctccccctggttcactttcatgcatataatatcaaaattggcattacaaactagccttcacagctatcagtcatattatcacatgtacataacatacatacacaaatatcaatgcctgaggaggcttcatccatttatatgggcacatctcacatcagggcttactaatcatgcctgaggaggcttcatccatttatatgggcacatctcacatcaggactttctttctttgcctgaggaggcttcatccagctatgtgggcacatctcacatcaggacttatatatatagactattaaattcaattctactggtcagagaatctaatcaagcacataaccacactatcacagtgttcagctcatcacatacatgtttccataaacagtaacacacaatttcaatatacatgcatcaagatatacactaaccataactccctaggagtatggtggaacacaacagtgggaaacactcccaagaacaaagagcttacctgctctcaacgctataccggctctctcggcttcgtggtcacaaccaccagtaatgtcactctcacgccctacataaggcatacaaacaatcaatcaataacggtcctcaaccgttagaatgaaaggaaaccctattcttttctattaaaatctctatgttctctatcttagggttatcagagctaaccaccttataggcgattcacagaccctcaacaggatctatcttggtccaaccaagaccttagagtctccctagactctgcataagttcaattcaatgatctcctaggtcatatatcaacaatttctcaacatgactaaaacagatatatcaacacattttcaccgtttatttgtccttctgaataacttttgtaaatgcacttaggctcataaatatcataacaccgtccatttcatcaacattcttcctactcatacatatctcagggtcaaaatcaaacttcatcaaaaatcatgtttcaaagtttaatattcatcagaacaacctcctgagcatacttttctaaaagaacccaagcctaattccatccctatcacaaagtgatcactattcatcccaagaacaatttcacaaatcaaacggtaaaacttgagtttcttacctctaaatcgacaagagagactaaagaacagcttttccaagcttaacgttcttaaaacgccttcttttctcctcagaatcaaactttgtggatttcccctagagaactggatctctttgtttgatggttttcagagaaaagtgatgatggaatctagctcattgagtagttcctttcaactttcatgttgggtgtgaagggttttggtcaacggttgagtgtttaagaagctcctctagttcatcaatggcagaagcagaaaaaaaagaaaaaggatcgagagagagaaagagacactactacaaaaagcgccaacgacgacggttattttggccctacgatgacggttgttgaaccgtcatcgttgtacgtgttgttaaaaaggggcactttcgaccacggttccaaaaaccgtcatcgtttctaattttttatttattttttatttaaattaataggaaacaatgacggttatttaggaaaaccgtcatcgtatgctgtcatacgatgacggttttctcctcataaccgtcttcgtttctatttaatttaaattttaatttttttaaaaaataaaaaacctacgaagacggttatttaggaaaaccgtcatcgtaagctgccataccatgacggttttcctagataaccgtcttcgtaggtttttaatttttaaaaaaattaaaattgaaattaaaaacgtacaaagacggttattacgaaaaccgtcatcgtatggtatcatacaatgacggttttcctaaataaccgtcttcgtaggtttttaatttttaaaaaaatttaaatttaaattaaatagaaacgaagacggttattaagagaaaaccgtcatcgtatgacagcatacgatgacggttttcctaaataaccgtcttcgtaggtttttaatttttaaaaaaattaaatttgaaattaaatagaaacgaagacggttatgaggagaaaaccgtcatcgtatggcagctaacgatgacggttttcttaaataaccgtcttcgtaggttttttatttttaaaaaaattaaaattgaaattaaaaacatacgaagacggttattacgaaaatcgtcattgtatggcggcatacgatgacggttttcctaaataaccgtctttgtaggtttttaattttaattttaatttttttgtaaacgcatctcccaactttttttttctaaattggtttctatactaccacataaattttaaaaatacaccacattgaagttattttattgtataaaataaataaaaaaactaaattgttagtacactaaaatttaaaattgagcttaacgctataaatttaatttaacacaaaattaaataaaataccatgcaacaatgacatactaaagggtcaatacttaatatgcttactttagaacctttttcactggagttgagttcatcaattacaattttcacataatcccttgtgacaatatgaagcattaatgaatgattaagtaacttctcaccaaatatctacgacaacaacaacaataattggaacaagaattgctaacattcaatgtgtgcaattgtaacaagttaagaggggagataaacaaggctaaacaaaacaagttattatatgaattaaaaaaacaccccaacatgtgaataaggaatagaatatacttaaaaagttaaaatatgtcccaacattgacagcatcaacatgaagagtttaaaataatttaatccagaaactaaaatccaattgtttactaactaaaatccacattctatgagttctctctatcttagcaacttttgtttggacacacaaataaggcttgggctttatatattccacacagagaaccataagaagtaccaatctatgccagccctgtgtataaaaaatccttgaaagaaaaaccaacaaagaaaatttcataatagaaagtttgaaagaacaatcagttcaataggaagggaagttcacagaagcatagctacatggcgtgtgaaacatgccagaagagagagtgattttggaaacagaacagtttcatattttgttcattttcttcccatgctcaaaaaggacaaagaatttggtgaattatatgtatctacttgattaaattttctttctccattgaccctttattttcacttattcatccaaaccacagaaattcctctattcattaattttctcaccccctatttatttcctccctcttttctccttaaccaaattaccatatcagtctagttcagttccacaaacatcctatagattaatcatgttccatttaataacagagagcacaggaaaattcattcactaaatgcatatctcagatggtttcaattgtatgtaacagtaacaaagtttacctttggagatgcaccaaaaggaatgtgttgtaagccaacagtgaagtacaattctttccccaactaaatgtgtcatgctacataagctaaaagcccacaaccccaactgatatagggtttaaagaactcaaaccttcatacggacctcttccatgtaaatgctgccagtaggtaatggaggagcagaagctttgtccattaaggccccacaccaaccttcttaccagaggagctatcatatatagaaacatggcatgtaactggcgtggtcccatcaggaaactccaatggcaactccactgtcatagttaaaagagaaaatgttttttcatctcttgttcagaatgacagagttaaaattctaaattgacaacattgtcaaataacatcaaatcatgaaaaacaagataggtgtgcttattaccgaaggaaattactaagcatatggagttattctcctgttattctttatgataacacaagtacagtggctttggctaataaccctgttctccattcttgaactaaacatatagagttggatctgttttttgttagagagaaggtgctcactaatctgattcaagtagttcactaatctgttagttctattatgtttgttaagctgtatcccggtgcattagttcccgacattgcaactatcttaatggcccacgaggctaagactaagggtggtgaaaaataaaatgggactattacagttgttaagagaacattttgtcattagtaatagggaaagcacaaacaaaagatatgccacaataaacttaccttggacactggtgatgcatctcctgccatgataccatcaactccaatgatggagaagaaagcaaggaaaccatttctctgccccgtcgctgctgtaaatccaatgaagccattcgccgttattaccataaacctaatatagccaatcttttttgctgctacacaaattgtaacactcccatgtccaaccgtaaattttgtgatgcaatttcataacctgttgggataataaatttgaatcatttgtttcaagttagtaagtcaaaatactgattaaatcaactgctaaaaataatgtttttttttctaattcatcatctagaagaatttaaattcttctgatttacttatacaacaaattggaatcatttaatttctgcaggcctagttaaaaaattaatgatgcaccacaagagtactctagcactgctacttgttttactggaaaagagaaattagtaatagtaaaagcacataaagaaagaaattccataaacgaatccaataccctggacactagaagtgctacttattccagttgaatttgaataccaatgtatattatttttgtatgcttgaggtggaagcaatgaaaatactctctgccctgtctcacatgtggttttaatgaaaccaaagtggtttgctgctacataaattgtctatgacaatcaactatgtctaccaatctttgcttctctttaaaggatggtttcttataaggattggtgaattgaatattattcatgctattttctggtttgattacatggagtccagtttgcttgacaatcacatccttaggggttgcttcaataccaatggaaaccaccacatgattccattaattttttgtgagaggtttatctagacactcttcaaacttcatgtattttgtagaacatgattgattgttgataaatcctttgttttactaaagatggccatataaactgtaaagtatgatgtttctctctcccgccgatgaaactaaataaagacaacaggtggtacttacatatccaacccgccatcccatcattccatatgcttttgagaatgagaaaacattaacaatatgatttccctcaacacaagagtgtttcaggccatcatacataaaatacctgcagacaaaattaatttgtttaaaagcaatttttgaaatatgaaaaacttgcagctcagacaacatgattccgagatgattgtagatttgttaataggtagtcttagtgaagactacaagtaggatctcatatggatattttacaccagtggctaaccacaatataagtgaaacagattaaaaaattatctaaaatgacaaagaagggaaaaacttgtcaataaaataattaggaattttctggaacacaagctatgtaaccaatttatcaaatggtcctaagaagaatagagaaactttgtttttgtttactttaataattaaagaaataatatgattttttttcttctattagcactgcaagttaaaaggcttactcgtatgtattatcaacaacaagccaagagccagcattcttgcagagatctgaaatcctctgatcaaataagagaaaatactcagaaattttataaatatttttataacaaaaaaaaggtactgttactgttatggtcgatcagcatattcttggggaatattatccggtggccacacaagaagattaaaaaaggatcacttctaaaatcatactagctgttgataaattcagagggagagagagacctttagaagcttctctggaatgtaagttccagatggattgcctggatttacaacagtaacaagctttgcaacttacaacttaatccaatatcataaaacactcaactggttggacatgcataaatttatagcagcccaatataccttctgaaaagaggaaaggtttacatgtatacagacccaatccatccaacatttaaccaatatgtgaaccccctggatggaggaaaaaagatgctcttagcaaccaaagattgcctttgcttcccaagtccatgccagtaaaaaatggattatagtaaccagatcatgtagcttcttacctgcatcaggatggagtgtgtctgagctaccaggaccaactagaatattggtaatgccagtcatctggaaggacatgtacacattgaagtagtatggagcaaacataaccacagaatcacccggatcacagagagtgagaattagattcacaaatgcctatgtttgtaggaatacaacaagttaccacagatgattagagatgagcacaataatactgttgaaacttgaaagttcaaacttggaaagacatcaaagtaacataaaattaacagaccacaagtgatagaagctataaatgttgagctaattcagtcaattctgaaagttacagtttccacagttacaaaaaccccatgctatttgtatcagatacatgttctttcaaatgctttttgagttataggaagaagaagtgcaagactatgatggttatagataagatttcacacaagcaagcacgaaaggctataattttaaatgggcaaacataaagaaatcaaacggaagctgaaatgctgatacacttcaccatgttatctttttgagggtataacaaggcaatgaacataaaacaaaaattacatggtcaattagtattgttaacctcacctgattggcacctgatgtaaccattactgaagatttgtgcaaattattttcatcacgcaactacatgaagatgataaaagcaaataagttaattcattggtcaccaagatccaaatttcatatagcaaaataatttatcacagagcaataagatacaaaaggcttaataataaaagcaattaatttctagattcagacgtttggtattttaatcataacctctatatgcttatggtgtttattcataagattcagacgtgcaaggttatcaaatctgagatcctaagacacataaaatgcgtgataataacaacttaaaataccaaactatcttcaaacaaatatatctgcatataaaataacataaataagcaaaatagcataaaaatcagaactccatgaaattttcacaccaacaacagctccaccagatgacattttaataacagtaaaacttgagaacaattacatccaaccaaaagggtaaaaaacaccaaaacagagcacaattatatggactaaccagcaagtactgaagcaaaaacaaaccagtaagcacccaccacacagacacagaaacagattgaagaaaaaagaaaatgggagtggttgcgcgacggagcatcgcgagattaggatctgatcgctcggtctcgctaggtccgagagagagagagagagagagagagagagagagagagagaatgggagtgtttgtttgtgtgtgatgcgagtgagagactgtgaaaagggcaaaaattttgaagagaggagtggggaaggagattatttcttcttgtagtgaaggtgtggaaggtgtcaactagggcacagagaggaaaacgcaaaaagcttttgttggagctgattgtggagcttttaatttcaattttaaattgatatgcataaaacaaagacgtctttgaaatagagcaagtccacgacggttgtttatacccgtctttgttcccccctgtcaagcatggtaaacttcaaaagaattgcaaaattgccaccggctatgatacaaagacggttacgaaataaccgtcattgttgctatgtcgtaaaaagctctatttctagtagtgagaggctattatactacgcggtggcattgtcgtaaatatgaggttaaaaacgacgacgggtattacggtaaccgtcttagtatgctacgcggtggcatttttgtgattttgctataactaaacaaagtcagttattattaaaaccgtccttgtttgtaacagtagatttaaaattaaattaaggaaaatgagcgtgccctacactacaaaatagggaactcgtgggacctcgcttcctccttcctcatcttttcctgcctcttcctttccctcttcgttttcttctttgcttttctcagacacctttgagggcctcgtctccccagcaaccaccgtggtgggcccaatcggcacatccacagcggagagactcgcgggaactgacggcggaggcgaggaagagaccctcatcctgttgctgcttctgccccacaccaacccccatctgcgcgaactgctcctcaacccccaacaccttctaatcctccacgacaagaaccctaatcggtggcaagtttgtgagcaaatgcgacaataaattttgttttggatttggtttttgaaatgtatgttttgttgctgcagcgactgagaatcctttcaatagcattttgaggacgctcgagaagcccgacggcgctgactagtttggaaagtactttagcttgcccgctctcaacgatcccataatcggtgagtcactgattttcattttctgacaagagaaaatgttgaaggaagcgttgttcaatattgtcttatttgtgtgtgtgtgtgtgtgtgtgtgtgttattggttggttttaattgaatggttctatttttcaattgcatttttctatgatgctactgcttgtgtctagtgagatttgttgctgtttttgggggaatgtaatgttgcaatttcagtgatgattcgatgagctgaatttgaatctggagaggttgagaattgatggtgacatttatatatttccctcttattcgtgcagtgcaaggtggtgaagtagagacaccagagagcaagaagagtgaagggtcctctatttcttttgtgatattagtgttgttatatatcactttttagttttttaaaataatataaacttcaaacattgttctcgctgctgacatgactcctgttttaattttgtttcttttgttctgttaacaatacatttctgttggttgaagtgttgcattgctttcataggccctttctttgtttttaaattaatcatgcatgcatgcatttgcaattttgcataaccatatcttcaaactacactctaaataagctattatattatgctatatattatatatattagaaactctagttgttgtgtattatctgtctttatgatagaacaaaagaaaataccagttataacttataagctacttagaaacttgtttaagctaggccttatttatgatggaacaaaagtcttatgatttttgtttcttagatctttgtcttaatacttagaaacttgtttaatctgccaaactaggccttattggtgtgtttctcttgttaactatgtctttacttagattggtggctgaagttcatatggaaaaaaaggtgaagaaccagaaagcaaagtcaaaatcttctgaagcacggaagcaggtcagtagtgtgcgagtaattcaacggaatctagtttacatagtgggattgcctctcaatctggcagatgaagatgtaaattttttgcctcatatgctttcaaattcaatagttgtcgtcttctgtatctgttttgttttcaggccaccatccccttccttgtcttctcattttttcttattctcggtgtaaatttactaatatttattttatctctgtgcagttcctccagtgtcgagaatattttggtcaatgtgggaaggtcttaaaagtgtcaatgtctcggactacagctggtgttgttcagcagtttccaaacaatacatgtagtgtgtaagtttatgttgtctttaatgcaacttggctttttttcttagtggtattgtgtagggtgattagcctgtggtaatccaattctagcttatcagttctcattgtttttggttgatgcatttgcagggcttgttttggaaccactaaatattgtcatgcatggctcagagaaacatggtttgaaaattactaattccttatgaattataacttgttctttcactagttaaagcttgattggggatagatcttgatgaccagccttgcagcaatccagattgtctatatctgcatgagattggctctcaagaggatagtttcacaaaagatgaaaaaatttcagcatacactaggtatttttctaatcttaaatgaactttcatgcaaggcttgttatggttctgttgaaagatagaatctattgtttatatgatccagccatgattggataaagtaaagaagattacttgacctttatcttgttaagaagaatgtttcttgtcctggtcatgttagcattacatattagctttcagttttaaattaacattgatggatctatcatctgttatgatactaagctatatgagttgcagagctgaaacttttatttgcttaatcatgttgactctgttaaatatttataagaacatgaaaccttatgcctcaacgctcttagaaaatcgaggaagtaataaatgataaaaccattccttgaaataattgaaactccccaagcattatctttttcaagggcaattgacaaacttttttttttcctgcaattagttaaaggctggatgtattttttaaattgattcagatgggttttgcttggcagttgatacatgattggaccattcattcccccccccccatattatatattgtttttatttgatcttttgttatcaaaatcaaatgatggtgtttaaagggatgaatccgttcataggaatcattaaannnnnnnnnntaagcttatggtagacggtagaatgcttaaaatataatgatgttgaacaaatttcaaattaaatatgaattgttttggtgtagttttttattttatttttcattcctctaaaatatatttgtctattttcgtattatttattttctactaaattcgctcttgcagaactgtttgagtcgcaaacccattcgaacttgaagtctgcaacgcccggacaccatcgacgaccatcggatgtcgacatcgtcgcggtcctgtgtttgagcattcaattccacaccgttttttcttggtatctcctccctcatccaaactgttttttttttttttttttgcttctctcacaattcaatttcagatttcttgtttccccatgcattcatatgaattgtgttgtgcttctgtcatttactttatgttggtgtgcgtatgccagtgcaatttacttcaattatttatcacatttcaagctatgctgcgtagatttttttgctatcgtgcaaaaatcagccctgttgtcaaataaatctggcacatcatatctgaatttctaactcatctataagattttactaactttatgagtattttaacattaaaaaaatgtaaaatcagtccttagatttttagtgccacctgcaaacccaaaaagttatatcgtgagaaaattatgatgttttagaatttttttttttttatgttcacgatttatttctcttttatattttacattgcagaaacaatttttcatgcttattatataaaattttattacttagtttaaaaattacgtgagttcaatttgtccaagatcnnnnnnnnnntttgtgcaggatatttatttgtttttatataattataattcataattgaatggttctatttttaattgcatccttctcttaggttgggattttaaggaaagctgagtaaacaactggaaggctcttttttctctgaaagcatatatatatatatatatatatatatatatatatatatatatatatatatatatatatatatatatatatatatatatatatatatatatacgatgacgtgtttcatattgcatcacattgcaatgtcaaaaggtaaccaatttctattaagctatgaacctatcatcactgctacaattcaaagtataattgaaccaagtaaaatgctattagattttttttactgctttatcacttaaattgtttttattttactgcttcccaccacctctcagtcccttgtgtgtctgtcccctagtaaacaaaggtacttttctgaaaactgctatttttctttcctttttttatctgtatcaatatcttaagcaaaatctatttactagaccaattattgtttaggattttctgtaggatgacgggtgtctctgaagtctaattattgttgcttatgtttcaggaagttcctttgtgtttcatgaaagcacaaaatgatacttgttaagaaattcttttatattgtataaattctttttcaggaagttctaggtttccagcattacacccgtcaatatgaacctgtgtacctcctaatggtcttctggcgcctacacccgtcaaccttccaattgctgcagttgcaaaagtctgctacttatactccatctctgattcatggtgtatgataccttgcatttcaaacaactggttactttgatttttaattgattgataatatatataatgctgcctatttttttcaatggaatttacatgccaggcgcactctacatttttacactcatttaaaaaggcttattatcattagtgtcttcatagttgcaattgtgtttactagcctaagtgaacaggaaaatatcttgtttgatgaaatttatttatataatttaaggaaaatatcttgtctctaataaaatttctagttctatatgaaaatttaatgggttatatgccttgcagagttaaatttgtaacctcctttatttttcaggtcttaagcaaggacaatcctccttagaaaacatatatctataaactggatgttccagttgttgcaaggtggataactttggctgttgccccatttgaaattcttcctgatcaccaatttagccttatatcacatatgtgttcgctgcctaatctatcaaagatgcggaatacagtggattccattaaatccttcaggtttgacatgtgatagctgtaatttaactagcttgaaactggtagtttttttcagcataaaattgtataatgattaaatagttggatttttattggtgagcagctgctataaggattatctttctgtagacttcccatttgactcttatacaaaagtttgcatagagccaaagatggcagtgtcatcattgagtttaagagcctctatgagtgtatttagttctcaagttttgtttgatgagaaggttattgaccaggtcagttcactacttgaattcttttatttgatttttgattttttctaattaatctttttctgaatgaatataattaatcttccagcaattttctagtaaaatatgtcaacttccagccacatcaaatctccggctaatgtgaagagtgttccacgaatggtataatttttgccttataatataagtttttccttttcatctgagtttattcgatttaatatttaaaaattgggtttatttatgacaagcttgaagcttaattagtaatgtgtagttcatgtatcttgtgcgaaatgttttcatgcctcacatggttaacactgttagttttgtaggcattagtatttacaaagtagcaccctgtactcatttttattctatgcgcaagaaatagtcatccactcagggctttgaggaatgggagcagctagtccaacttcggtgaactacttattgaccaaaaggtcagccagccccgccagaatcaatccattccatcctatctcttcctctctctatttctctgtcaccctctaacttaagcaggtctgatccaatcaactagtataaaagagctcatagcccatcctttgccaatttctctcagccttcatcttaagacccatttatttgcctcacctcattgggtcccattagtgttggtggaaggtaagtgtaaatacactgaattactttgtaaaatcagttttaggctattgatttatgactatttatgatgataaaaacataatccattttcctttaaatgatatgaaagtacttacagtttggtgtttataccagtatgaaatgggttggaggagaggttctgcaagcactgccttatgatgtgccaattccaggttacctacccatgaacaccatcattccttatttgtttttgatatatatatatatatatatatatatatatatatatatatatatatatatatatatatatatttgtgataactactgcatatttagtatgattgtactagtctttcttgtgcagtgcccactggcaggtaaatcattagagcctttggtgttaatcttgaagaatctatttatgtcttataaattgaaaaaaaatgtgatnnnnnnnnnngaaataaaaacaaacaatgacggttatttaggaagaccgtcatcgtaggtggacatacgatgatgattttcgtaaatagccatcttcgtaggtttttaatttcaattttattttttttaaaaaaattaaaaacctacgaagacggttattaaggaaaaccgtcatcgtaggtcagtatacgatgacggctttctcttaataaccgtcttcgtttctatttaattttagttttaattttttttgaaattaaaaacctacgacgacggttattaaggaaaaccgtcatcgtatgttcacctacgatgacggtttttgtaaataaccgtcttcataggtttttaatttcaattttatttttttaaaaaaattaagaacctaccaagacgattattaaggaaaaccgtaatcgtaggtggacatacgatgacgnnnnnnnnnnaaacataatccattttcctttaaatgatatgaaagtacttacagtttggtgtttataccagtatgaaatgggttggaggagaggttctgcaagcactgccttatgatgtgccaattccaggttacctacccatgaacaccatcattccttatttgtttttgatatatatatatatatatatatatatatatatatatatatatatatatatatatatatttgtgataactactgcatatttagtatgattgtactagtctttcttgtgcagtgcccactggcaggtaaatcattagagcctttggtgttaatcttgaagaatctatttatgtcttataaattgaaaaaaaatgtgattacgataaaagattccatataaattgtaaataaattcctcgataaaaattactttaatggtattttaacctataaatatattatttttcacttttagtgttattatataattttattattttgttgtcccgtttgttcactattttatcaagagttcaatctgcttagttacttaagttgaagggccgaaaacttgaaacatgattgtttaacagttgtctcatataataatctttgcagcttctttatatgaagatttttttcttaaaaaagtggaagtacataaagatgcctgatcttccattccaagttggggatttggcagagcaacctcttttcatagttgaaaaggtgacaaattaaagcattatcactttaacctttttcgttttgttttattttcattatatatgtggaaagagaaattgcagtgaagttatctagaaatgataaaatttttttactgtaaatttacttttatgactgatttttattacttagctaacatttgaatgagttttatcaaagaaatattgaattatatgatcttgtaaacaaaccatccaaaattataagttgttagcaaaatatacataaatgatttttatattatatttcttacatcacccctcatgcaacaatccgttgtgcttgaagtatggacaatgcactggcctgtcaagcaacagtgatgattttttgggaacttttgggataaaaactgaaaccacactgttttctttatttatagcagggatatgcctatttttctccttataatttgggaaagaaaaactcattggtgaatctaaatcctgttacaagatgaaaaagttctgaacacatccatgatattatgttatactttcagaattgtttttctgaacatctggttagggaggttataaacatagcagtcaccttaaatactttgcagttatagttttccaagtattggcaccactcaatgttaaaatggctctagatttctatatatctttacagttaaatagaaggtataaacaaggattaccttcagaaggccaagcaactgtgagatcttcggctattgaaatagaacaagaaaaggtacaattaagatcaatttataacatggcacacacaactttatagatgttattgatcattgagtacctatctactttagaatttcattgagctcattgataacttttagtgttcaatctttggttcacctgttcaatcttgtattttggtaaaatatatacttaacttttagtgttcactctttggttcacctgttcatcacaacatcatgaatcctttgctcttgttcttctctaacaaaacataactattgcatacattcttttgctcttgttcttctctaacactctttctttataaactaattgctgttgtatcgattcatcgatatgttgcttcatagacaatgttttagcttatgttttctcccatccttcaaaggaatctttagtgagaaattggtaaaattattcttaagaaaaataaataattgatgattattattgtccaaactcacgaactgaagggaaatgagaaacaaacacacagagcaatgcatgaataattgaatattacctgccactgcttcttgtccagcggattctgaagtagccatattaaatattgacccattagtatgtcatattgttgcatggtattttatttaattttgtattaaattaaatttacagtgttaagctgaattttaaattttagtatactaacaatttagttttttttttattttatagaataaaatcccttcaatgtggtgtatttttttaattcatttggtagtatagaaaccaatttcgaaaaaaaagttaggtgatgcgtttacaaaaaaaaagtaattaacaaattgaaataaaaacaaacaatgacggttatttaggaagaccgtcatcgtaggtggacatacgatgatgattttcgtaaatagccatcttcgtaggtttttaatttcaattttattttttttaaaaaaattaaaaacctacgaagacggttattaaggaaaaccgtcatcgtaggtcagtatacgatgacggctttctcttaataaccgtcttcgtttctatttaattttagttttaattttttttgaaattaaaaacctacgacgacggttattaaggaaaaccgtcatcgtatgttcacctacgatgacggtttttgtaaataaccgtcttcataggtttttaatttcaattttatttttttaaaaaaattaagaacctaccaagacgattattaaggaaaaccgtaatcgtaggtggacatacgatgacggttttctcttaataaccgtcttcgtaggtttttagtttcaattttaatttttttaaaaaattaaaaacccacgaagacggttattaaggaaaatcgtcgtcgtaggtggacatacgatgacgggtttttgtaaataaccgtcttcgtaggtttttaatttcaaaaaaaattaaaattaaaattaaatagaaacgaagacggttattaagagaaaaccgtcatcgtatactgacctacgatgacgattttcctaaataaccgtcgtcgtttccatttaattttaaaagttaaataaaaaaaattagaaacgatgacggtttttcgaaccgtcgtcgaaagtgtccctttttaacgacacgcgcaacaatgacggttcaacaaccatcgtcgtagggataaaataaccgtcgttaaaagtctcctgtgtagtagtggcaactgcatagattaagcgaaaaatgtaaattaaaatcttaatatatatatatatatatatacatatatttgagttattttatatataacttaagtcattaaactttactcataaaatgtgacacaagtgacaaataacatgaatcatttaagcatatgttagagattcaatatctgattatgtgaatagagcaacacatgtgagtgcatcagccgtgcgagtgtttacatgaattgcttgtttctgatttgtttgttcgatatcaggtttaggagtcaatgaaattgctagtattttccattggctatgttgtgtgaattttttttttattagatttttgttcttctcggtcgatattgttgaactaggttttatgcttcccttttgattaggggtgtaaatgaatcgtgttagaatataagtgtgaaataaagtcgtatattagataaaaatagaaaagttgaacataagacttatatgcatgagtcttaagattttggttaaagtgtggtgtctagattaaatttgattttaatttaataaaattgattatagttggtattttgaattgtaaaacaatgttatgtttatgatttttgattatatatatacttctgaagattatgtatgttaattttgggaaaagaagtgtttggtgggcacattaacaaaccgaaagtgagaggagaagaagtgatggaggatggaaagatattgtaatcgtaacggtactagttaactatttcatccctgatctattgttgcgttggaaattttcaatcatcttttccctatgttcatcatgctagatttgggttctattatgtaatgttaactattatgttacgtgcttggtttggaagtttggctaggggggctggtatatggatgttaaataattctgtgtttggcgagggggttgaaattgtatggagattggtggccgaagattcgtttaagacagattttttacatatataagtggggtaaaaattcattgttacgtttgagtatgtttttttgtggctggaaatgatttgtctcctattgcagtgttttagtttgtgattgatttttttcttcttctttatgaagtaatttttcacggctaaaatcgtgagaaaatgatttaatacctgcttaatatttttatcaaataatttttgacggttttaactttcagagaaaaaaattatcaaaaaatgactgtcatatcaaaatataacggaggtatttaacgttataatctaaaaataaaaaaaaaattattaagagattcaaaattggtcaaatattaaaaaatatttaaaacaaaattataaaaatttaggaattaaaaatattttttatctttaaaatgaggatgtttttaattttagcattttaacataactcatttgttaattttctcattaaatatcgacaaaaattatcatgatcaattgacattgcaacttatcttataaaattatcctattactcacacattccctcctttctcgatcgttcagttttcatcaccaatccctacttatcttagtaaacctattaatactaatctcctgatacttcattatcgtcttcattaatttttcacttaatcctaaatgagtaaatgttggcagccttgagcctacagcaaacactgcgcattttgcagaaatgtcaccattgtcaacaaacacttaagcttcagagtgctaatctataactttaatttctaccaatatcgtttaagtattttaaatttgcacgttttcataataaactaaactaatgtaaaatgtttgagttaatactttattatagatatccacttgtcatttgtttagttttgaaaatttattatctctatatttacactagatttattgtccatattatttatatttatattttacttaatactttatccttatttattgacttagtgcatatgtataatttctaattacatactttatttttatattcaataaatgaattagaaaatgtcaagacgtttatctgaaatttaaagagaatatataactacatggagtatttataacatgtttggtatcacatcatttaactcaagacacacatccaattctcatgtaaacataaaagtttttatttttattcacaatgttaatttttttgttagtagaagagaataaatttatgatattttcctttttcttctctttcttctctttcttacttatttaatcaattttgtatatttatataaaagctactttgcatagctttcggttttcacgttttctatccagggttttcttctttctataactgaactaaacacatttaatcgattgatgtgtggaaattttcatgtgttgaattggttcaagtttgcaggctaggattgaacatggacactgatagttcttattatgagtttcccctctgttgttcattacaacttttagctaatgtctcaagggtttatttcccccgttgtcatgcttaggactatgttttgttttggccattaattcataataaaaagaaatagttcaggttcagggtatttcacccctaaaatgtaatcaatgaaaaacatatttaattgtgacgaagtatttttgtctatgaatcttagttgatgtaccgtgcacgtgtctctcttaaatacattctgagagaagacaaaccaatgtgctaattagaccaagttaggagtaaatgaagtaatgtaatgaacactggttctaactccttgaccaccccttcgcagagcctgccccccccttgatgacagatgatgctggaactttataaaaaaatcgattatcataattttttattccattttaaagaattaaaaaaaaaaaacgatttcaaatttccacttaaagtaatttcaagttttcacttttctaattctaaaagttttaagtaaaaaagtaaaattgtttctggttatcttaatagaaaaagcaagacgaattaataaaagtattattaaaaggattctagttctaatgaaaataaaataatttttcaattttttatttattaaatttaaattcaaaaaatagaagagttgagtgaaacaaaaaaaaatacaacaatttataagaataatccaataatttttgaaagaatcatttcggttcaagagtttaaaagtgcttcttatttttggttttatttttgtccaactataattttattaaatatttaaaaataagttttttttcaatatgtatatttaatattttactttttaatatattatgttttcaattccttagcaagtaagttcaatataaagaccattattttggaaaatgatctatgaaatttactagttatatttaaaatattttttatttatacctaataacccttttttgttatttaacaatatgcgaaaaattatacgttccttaaccaatattttgcttggctctaagtggaattttaacaatttcctcttattgatgtgttattaaatattaattatatatttaaataatattgggcttttacatataaataacttgcaacgtaaaagggcagagtagagtgatgacaaccagatcaatactaaaacgggaccccttcccatttctaaaaagaatactagttaatatttgtatgaaatattttgttttggttgaagtaatgaagttcactgacatatacgcttgagaaaggaaatttaattattgtacgtacacataaagtaagcaaaatttccacataacttgccaaatcaaaataatcctctgtacaagaagccagaaagtaacaaagggaaagaaacaacacccttgttgtacaataataacttggacccttgtggctcttcttcgatgatagtttctaatctgaatgaatttgaggatcttcgactccgagaatgagaaatgaggagggctggtgcaacttcaccacaattgtggacagatttcatttctctcaccatttgaaaataatgaaactcaagcaagcaaaccctttgttttttggcagaatgagaaaacttgaatcatttatagattgttacaaagaatttaacgaggtttcaaacccgaaataggacaggacagaaagtccaacaatgttagttaggaaccttgataatctaatctagtttgcatatattttcctcgacaactagaatttggtggcaattttgtttttggtacatatttggtggcaatttttttttccttttacttatttgggattcctttttacacattggtgaataaattctgttatagttgctatatttttttctggttgaattactctatataggtttttatattttttagaaaacttattgagtttatctcttttaacatggagaaacatgtaaagtaagaaagtaaaaagtatatcgagcattcgttatagttaattaagcttatgaaatactttattaaaataattaataaatattctttatgcatttccacaattgaaaagactaaaatgcaaaattcttacaatatgctcttttgtctatatatttaaatatcaatttagatattaactaaattcaagtcttaggcaaacacttaaaagaaaaaagtttccaaaacacttttttttttatagttacttaatgataaaataatttttatgtattgttagtataaaaaaatttcatactattatttaattacaattcattatgaatgacagtgtaaaattaatgataatactttaagaaaaacttaaaatatacaaatttataattaagtctctaatttaataataatttttaaattatgtttcaataagcttatggtagacggtagaatgcttaaaatataatgatgttgaacaaatttcaaattaaatatgaattgttttggtgtagttttttattttatttttcattcctctaaaatatatttgtctattttcgtattatttattttctactaaattcgctcttgcagaactgtttgagtcgcaaacccattcgaacttgaagtctgcaacgcccggacaccatcgacgaccatcggatgtcgacatcgtcgcggtcctgtgtttgagcattcaattccacaccgttttttcttggtatctcctccctcatccaaactgttttttttttttttttttgcttctctcacaattcaatttcagatttcttgtttccccatgcattcatatgaattgtgttgtgcttctgtcatttactttatgttggtgtgcgtatgccagtgcaatttacttcaattatttatcacatttcaagctatgctgcgtagatttttttgctatcgtgcaaaaatcagccctgttgtcaaataaatctggcacatcatatctgaatttctaactcatctataagattttactaactttatgagtattttaacattaaaaaaatgtaaaatcagtccttagatttttagtgccacctgcaaacccaaaaagttatatcgtgagaaaattatgatgttttagaatttttttttttttatgttcacgatttatttctcttttatattttacattgcagaaacaatttttcatgcttattatataaaattttattacttagtttaaaaattacgtgagttcaatttgtccaagatccgcaagcccaaacatcagtcatctccttcacatgaaccctaaatctgaactaccttgattccgctctgcaacggctgagaaaatagcgacgccgaaacacgctcgtcttcacgatcctgcgatccagcgcggcatttccagcgattccgctctccgaccagtctgcgcagggtgaagaattgcgcgattcgtctggaaatcgcgattcaagcacgtttcatccccgatacagagattcaaccacgattcaggaacaaaaacgagacaacctccgattcgtatcggtagcagctgtaatcgtatcgaatcgtgcgatacgtatcgtgaatcgtacgatactaactaccattgatgacaattatccaagtttcatatgatttaaggatggagacactgcttctaggtttttgcattgagtaacaataggtaggagcctaggaggtataaaaatcttttgaaagagtttgtgtcggaatgcttcctgccacgtcttcccatgggctctggtatgtgctatgcgtggagctagttcagaaatagttgccaatttactttttatgctttcatacacttacttatggaataatttgtttgctagtcttggtgaactttgggtggttgtgccactttgtaacagtttcttttaacttggttcttttaaggataaggaagctaaaattacatatttcaagttttacagttctatggtgaatttggtttgaccggattccctcactttcaagggagcctctttgccccttagtctactgttggacaggattattttatttgcttctatttggtgccttgctcatggatttttgtggagatgtcttcacctccaatatgcggagagctacgtatttaacagccttgctgcactcttgagtcttgaactttattgttatttcagtttttaaatttgtttttcctgttctggaggatttcttatccttcctactaattctttatcttaatagttcttattttacgaaagaatcaaaacttgtcatggattgcatatttgttaccattccttcttcaaatgttttatcttccataaatgctacaaacctaatcatcagtctgtattctgtacctgttactagaagatatgtgcatgaagttgactatagattcctaactgttttatgcaaataatccatttgcagctttcacatattggctgtcaaggatactcagataaactttcttggtaactatgctgacttttatgcaggaagttcaaaagggcatgatttccatcaatacagcctccatattggttgaaaattgagcaaattctgtttgagtatacaaaaacagccttgttgggtttcagcattaaatacaacatctccattccttttatttcttctatcactcccaacttctgtcatgggaaaagagaaacaaagcttcaaagaagttcaccattctcataatcctaaaacaactctccagtggttctttcttgtagctacctgcataaaagttcttcttttcccatcctaccgtagtacagattttgaggtgcaccgcaactggctagctttgactcactccctccctctttcccagtggtactttgatgagacaagtccatggactcttgattacccaccattctttgcttattttgaacgatttctatccagttttgctcacttcattgatccccaaatagtgcatctccaggatggcctgaattatagctccaacaaggtggtttattttcaaagagttactgtaattctttcagatttgtctcttctttatggggtttacagacttactcggaatctggattcaagaaagcagcagttgatctggtcattggttatttggtcaccgatgcttttcatagtggaccatgtgcattttcagtacaatggatttctcatcgggattttgttgatctcactttcatatttggaggaaggaagggatttgttaggtggttttgtctttgctgttctcttgtgctttaagcatttatttgctgtggcagcacccgtatattttgtttatttgttgagacactattgttggggtggaatagtaagaggcttcagtcgacttttgattatgggaggagtggttacagcagtgtttgcatctgcatttggaccatttttccacctagggcaggtaaatattatttttgtatcttgaattcatatttggtcatcatttttcccatatgtcttgctgttttcccctttttctgataaatcattgcattaaccaatttgaaattgattactatttgttgaaaagattaggaatttcaggtgtcttgttgattttcagaaatgtggaatgataaagtgatatgttttgtttccaacttattgaataatggagaatacaattggatgcttggtataaccatgaaaattgtatgagaaggagagttcttttatatgtcaaggttgtgccctgcatagtttctaatctaatgtcgatgtccagatgtactgagttttgatcaggttttataagaaaacaatttattttttatttattataatccttccacagaactaaaacaagaaagaagcaataaattaaatccaaagtaagtaaccacctgaactatctagtatccaaatgaggctaccgcaggaatagagcaatgctaccaaattacaaatgatcaactttgcatgctcaagtgaaagggaacaacttaaatcaccctttactaaattcttgtattcattttcctgtgtaaaagtgaagatatttcatatgcactctttgcattattgatttgcttattgattattcaaattataaattgcagatacaacaagtcattcaacggttgtttccatttggcagggggctttgccatgcatactgggccccaaatttttgggtattctatatcatgtcagacaaagtgcttgctttcatattcagaaaacttgggtttaatgtccagacaccaacaggttcattcaccgctggtctagtaggggattcctcaccattttctgtactacctcaggtaagatttacttttgtatttttattctctgaataacttgtttgttgttaaaccaaaaaaaacaaagtggatgttatgaccctggttaagctgatcacatgcttttgtgattatgtcaaaacagatgactgaagtaccttattttgctgtatacatttcattagtatgaggagatggaggaggatgttatattatttcttcaaactagttgtcatgcaccatgacctagccactgatagattggaaatttacttttaatcttgctgaaaatatatagctgattcactggatgatccttatcccattttctaagaataaaaatatagattataaatgtaatgttcacatggaaaccacaacttggtaactcaaaatcagcacctgtttgacatcaagaaatgatacttgtgaaactctataattggtgagagaatcataatattagcttttacatttcacacctcaggctagctatttcaacttcgaaggtgctacttttcaattgacatctacaattgagcttgataactagttatttgaaatctatgactacgatataacatcaacattagttatacaactttactttttattattcaaaagtttcatcaaagcattcatttttctatgtactaataatatgcagatcacaccatttgtgaccttcataatggttcttatacaactttacttttcactattcaaaagtttcatcaaagcattcatttttctatttactaatatgcagatcacaccatttgtgaccttcataatggttcttcttgccttatctccttgccttttcaaggcttggaagaatccacaaccacagatgattagtagatggatagcctatgcttatacatgtggctttctttttgggtggcatgtacatgagaaggcatcactccattttgtaataccacttgctattgtcgcaccacaaactctggaggatgcaaggcattactttttgctgtcaataggtatgcatttaatgctaattcatttgtttgcgagcttctaatgctttttttttcctttcatttttctaatgatataaaagttgaaggaaaaaaaacttgatatataagtaaaatgaaataaaatattatgaaaaatgtgtgcatgcttaattacatgtgatctttatataactagtggaaaacacacgtgatgcatatacccctttgaagacaatattttactaaatgtgataatgatttttttcaataatagtttgtcaattgctagtagtcttgcaaatatggtccttcctatcctattgttataggtttctgtgaataatgctccggctattgtaatctatgccctagatgtatatagatttgtcagatgtaggttcgtatattttatttccctttaaactgagtgaagccttttccattccgttatgtgtaagactgaacgaacacatgaagttacttgagcatacttaaggtttttggttagttttcaagacaaaggggggaaatgtaaagataagcagatttttcgttcatatcatagaaccttgtataatattcctctcccttaccttcgcatagcgaggaacctcttgataatggaatacgtagtttttttattttatttttatcatagaaccttgaacaatattatataaattaggatatatgagtatgtgatatttaagaaagtgagagaacgttatagaaaatacagagtgaaaaaagagtagtttctctgaaaatgacattctaaccggtaatcaaacttgtgatgggctctggtgcatataggatatgtgacaaatagggtatgatacaatacaagtttacatgaattttgcacaacggaataaaccatgaaaaaattctacatcagctttgtctttttctggtaatattgcttttttgtatatcatctacaatccaccaaacaaaactttgttttgaaacctttgtaagctggtaattaacgcataaatcttcaaacaccctttgtaagctggtaattcttcaccttgcttctgtttgttagtgtgtgttttggtgccttctattatttgagtaccctctgttactacagctgggttgcagctgtcagtttgttagttttggtgctgctggggttacaaggttgtgttaactcttgtctgtgtatataaagaactcggggttctctctttgcaagtaataataatagttcgcattcagtttctctcaggtttctttctctactctgtgctacagttttctttatactgtttttatattttcatagcccaactacagctaatattaagtatacttgtgagacaagcaactattccaatgttgcacaacattaatcaagcagcaaaaaagacaagcaaatctatagcaacagttattctatccagttcctcctttaacttggctatatgtttggattaaaaaatttgcttttaatgacctagaatacttttggatgccaaagaaacaagtttcaggtctcaccattttggtatcagtgctattcttttcatatttttgtttctttgaatttacccacgttacttgtgtgtgcagtatcttgctattctatttttccgctactatttgaggcacaagagtatttgatcaaagtattgttgctgcttctgcactccattttgatgtggtcaggattttcagcacaattttatgatggtgctgaagctacaagagcgccaactgctaattcaaagaaaaaaaatgatctatttggatctgaaggtaattcgggtgcaactgtgaagaaaggttttgctattggctggatggagaggatttatctgacaggtctcgtagttgtagagatatggggccaaattttacaccctttacttttgggtgataaatttgcatttgcacccctcatgttgatctccatatactgtgcttttgggatcatgtactcttggatttggcagttgatatccatagttaaatctcgttaaattttggactgtgcagttgatattggattttctttttgtgaattttatatgcgaaatttcaagagttaacatttgatttaacttttttaatcaaagcaagtcactgttttacatgagtattattaaaccatagttaaacaattatttgatcttgcctttgctgccccagattcatcttttccttttgtagggtggcttaactggctagagggatcagataaggctttgcatgcgggtgaatcctctagtgacgtgtcactagttttgtttgggagatccccctgcaagattgtggattatatatatatatatatatatatatatatatatatagccttatataagtagtttctgtgaagaaaaatatcttaaaaagtgacccttttactagattgtggattacatagccttggaataacttattcatactattgtatttttcttttaaaaaaaacataattggataaggatcgaagaataaagattgagaagggggtgtgtcccaagaaactgtgccaagagtgaagataaacagaatgaaactccaagataaagtcaatagcagtgacactagattaggatcatgcatgtacgttaacaacaaatgtgacagcttctattacacactttagaggcactgggctttgtgaggtgaaacaagaaaaaatgggaatattttaccattgcattattattgcgcaacctggacatctagtaaccctactttttgctttgctttagctatagctataactagtttttctggtgatgtatagtataactagtttaaatttatggcgcaaacttgttatctagtaaccctactttttgctacaactataactaggttagtccttatttttttgtggaactaggttagttgaatttggcggatctacggattatactattgttctctttacaaatatgaaaaaaaaaagattttattgtactaagtttagggataagatgacagtgatattttgtgcccaagacaaaattcaactaagttgtgctacatcccttttccattttcttttttgttatctataatctaaacatataaaaaatattaataacattccagtaacactgtcatgtagaacgaaacgatcacaatttttaataaagaaaagattgtgaaaaagaaaatttataaatataaatgatgatgtggccattgcttgtggaataataaatgctggatagtaacattttattcaatatacttttattgagtaaaatttatgtgagttctactaaatatgtcagttccgtttttcttttggtgatcagttcattcctaaagtagtgaggcttacatcaatttcaaccaataaaaaaatgtgttgctaacccccaccccaatctcgtgtaatatgatggaaatttaatgagggcaatcagcagtgtttgttcaaatcaagtcacatgagagaagagcttatgtgaaaatttagcttatacaaagggtattaagcaaatttaaatggtgaacaggactagttgtagttatatatgataatatagactattgaacattttttttattttggtaaaaaaaaaaggaatatttttatcctaattgtaacatttcccattataccgttctctctaatttcaaaaactatccaattagcttacatcatagaggatatatgcatttatcaccaaaaaaaaaaatagtggatatatgcatgaatgtagtgaaagaagaatgaaataactttttttatcaacgcgaaataattgtagttattaggtaagtttttgcaaactatttttaatgatcttaattttataacattgattttgtttagaattaaattcaaatgattttttttcaagaacaaatttaaagtaaaattgagtcgaaaattgccctctaaatgcataaaaacttagcataaagttatcatataaatgctgaaatatcacttctaaaaaaaatgaaaatgtggaaaattgaaataaatgttttagctgaaaatgtaaccatgcgtgactgtatttctagattaagaattcttcagaaaaaaattggcgaaacaagactatggtacaaaaagacaacagacaactaattggaatggggcaaattaaactgcagaagaaaattgttgggacttgagttgtgtagagtaaagtgaggactagaaaatggtcaaatggaaagagaaaatgtcttcaaatggcgatgctttaatttgaagggcagtcagttgttcacgtcacatgcatgtctttggttgtgtttccttccatttcctgaaaaagaaaacaagagtcaccagtcaaatttcatatcccactcatggctcatgatttaccaccaaaaaatagaataaaaaaatacaatattatttgaattgataatttcgtcatgggtaaataataaacaacgggaaatgaagttagtaacgattttctctcactgtcctggtgagtgtatgattatgtaactcctacatgcataacatgttatatccctctcatcaatagaaaaataatatttcttttttctaaattttaatttatcatttttaatttctttaggacttaatcactttttattcataaaaatacaatatttttttatgaggaacaaatatttttaatttatataattaagtaaatatataaaaatgatatttactccatatatttataggaattgaaataacaataaaaaaaaggaataaaggtggcattagaattaggaggaataactaagtaggtagccaaacaatttactgtacagtgaaacatataacaatttgtattgttttttgtcaagaaattgtattatgtataaacattttttgtatttttaaattaaataataaagagtttaaatttcatatattattagacagatacaaattatctcaaatatgattattataaaaaatatttatattcttattatatatgataatcaatgattaacttatgatgtatgattaaattaaaatgataattgtataattctgtagataatgatgattttaggtaataactgtcagctagtcatgattctgttttgccatcaacaggcaatgcgatcaatcctggtagtcttccaacagattttatctttccaaagtttactggtcaaacttatcagaatcaatctctacccgatcgattttcatttaatttattcacggtttgtttaaaacattgtcaataattttcttaaggcaaatttgttggtacttattttaaaataagtttctctaaattctctgtatggtaaataatagtaaagaaacgaagttttaccactataatatacgaaggtagttaaacattgagtatatatattatagggagattataatatttgcctattttcaattttaactatgaagttagaaacgttttacttttttgttgttttgaatagacgatgaggtcatttgcagtatgcaacagataacagagactgaagaacaaacaagatacccccaaacaaacacagtcgcggagcttgaattaaaatttagggggactcgataaattttaatgcatatctttaatctataatatcatattaaattgtaatataaatttaaaagttgagaaaaaaataatcaattacataaaaaatgataatttgtttacataattattacaaataaaaattgataaattttataatgagtgttaagataggaaaaaacattatatgtcaagcattacatattttagaaggaaattaaatgattattttatgaaaacataggttgcaaaactataacatcaaaatggaaaatgggagtaataacagtgcttaaaaaagtaaatggatcactgcatttatatcaaaacagaaaaataagtcaataatacaattgagataattatatattcaaaaaataactaaagttttaaaaagaaaacaaatatatacttatgaagataaatcatataaatatgaaaaacaaatctattaatattgttgaaactaagctacactttacatgttcagaagtatatatttgttttcttttgttttaagaaaaaagtataaaattttttaaataagtatttgaaataattatttgaaacaattatttgaaactaagctacacgttacatgttcagaaattttttttgtcctaaattacaagttaattgagttaaggtaaaaaaaaaactaagtatttgaaataattaatatttttattaatcatattattataaacatatatatttataattttgaaaaactttagtatcatggctcccctagcatagtccgcatgacatgatgtgtgaatacaggaaacacacatgacacatgcaatcacattattatgcatccatcacaaacactaatcatttcgtacggatattatatcatatgtatgacgtgctttctctctccctttccctctcaaaaacaaaaacccaaaattatctgcatgcatatcaatatcatcaattattatcatccttactagtatttagtagcaccccactttccctcaaaatccatactcaccggcgccggaaagagaccatcgacccaactaacttttctcatttaattattttaacatcacacgtttaaaaagaaacaaactttacaataacataccttattcaatcggcatggtcgtcgataggatttgattctttaaaaaaaaaaacaaagattaaattaagtaatgaatgaaaaagttaaatccatagcttgtgcatcttgtaacagctgaaattatctgctaattaaatacattctaaaatgagtaatacttgttttttttcattgggtagagcggactacataataatcaatacttaaaacaaaggaaaataatatgcactatgcatgcagccatattgttagccattaattaaacattctttgaatcaagtttgatggagaaaagtatgtatctattctgtaaggaagtacataatcaacataatagagaaccctcggaatacacggaaatacatcttcggtcagtctctagtagtaaacttaattactatcacttctcttctcactactcgagtatctatctatcactataataattgagttcaactccaaaaatttaatgcacttagaccgtaaaatttgtaaataacaatagtaaatattttttcatctctaattatagaattttttttctaatttttacatgtatcaattatttttttcttattcatatttttatttaattattcactctttaaatattaatgagaaataattaagtgaatagtaagataggaaaataacaatttttaaataataatacaaataattaaattaattacttttattaaataacataaattaattgaaagaattttatgactaggaaggaaggaaaacattttccggaactaattaactaactccaagtctagcacgataaacattgatatatatatatatatatatatatatatatatatatatatatatatatatcaccannnnnnnnnnnnnnnnnnnnnnnnnnnnnnnnnnnnnnnnnnnnnnnnnnnnnnnnnnnnttccatctaaaatgattaacattgatcgatcagtttcaccattaagtacgtacacacatcttaatcctatgaacataaaatattaattgttgcaaatatatatatatatatatatatatatatatatataatctggcaatattaagtaactatatattaactgattatatattgaaatttgaggcaatagaaataggaagatgaattagttaaagccaaagggctccggcttgcttgaggagaggaacgagagtgccgttgatgtgggcagccatgagggtctggacaccgccgaggaactttccgccgacgaagacggcggggaggggctggtggtgggtgccggcggcgagctggaagaggagggcgtggatggcggggccggcggcgtggcggtcaagctccaccaccgtgggacccaccccgaggctgaagagaaggcgcttggccacagtggacatgcagcactcgctggagctgaataccaccacggccttgcacgacgtcaggcggtgcaccacctcataagggctcatcatcgatgtcgctgcttctgatgctactacctccatttctgagttaattacttgctatattgccttggagagagagagagagctagcatacatatgaaatgaaatgaagaaggtgtgtgaatatgtgagtttatataatgtatcgaggaagctaagagagtaggttggtaagtgattaaccaaggctttttagcagttaaaagtgatattggactcgtgagtccaaggtaaaaacaaaaaggataagtttttaccatctttggaattcatcttactcactatagggtatattttcagagagcatgcataatggataatggattattaattgttgccatttacagagaaataattaaggaaatagatttttttttccttcttctttcttttctgaatccttaatgatcttgttgtttatatatataaatgggaaaaaatcaatttgatattggaaagatacgaagtgcattagtcattatattatatgttaatatgtaaagctaaattactccaaaaattaacaagtgtcagttagcgtgaggtactgaggtatgtttataagtaatgttggatttacatagtaacatatggtcaagaatttcatcttcttcctcttttatgatcatctctattttgcacatgtgagttctcccatttttttccttatgaaaataacctaaatccggcccctcactaaaatctgcttagtacttgaagcaaaatggcaacaaaagtccaaaagttatttaccccacccatttgtaagtgtcgttaatcttctcaactcattcactggcgactacaaaatcacactactaacgttcatgtcacatgtactaaaactagtaggaacttgtgtgcccccatcgccattacacaaagatgatgggtacgtttggtgattagacatgtgggcaacagaagcaagtggagagaagtattctagagacaaaagccaagtttttaaagaggtacgtattaaagagatgtgacttttaataagtgattgagaagtcaaataacaaaaactgattaactctcctttcaaatgaagatagtttagcgtaaatcacttggcaaccttagaattcttgtaatattcacagcttcactgtggttatagtgctatatatatatatatatatatatntaatattgtattttacttttgaaagtacgtacgcctgtgtttactcttttagaattgtacacaagtttaattaaggtagtgtaaagttcatgaataatgaacacaattattgttgttggtgactaaagtctaccgcgtataataactcattgtacagaaaaaagaaaaaaaaaacgagtataataaatatgacagataatcaatttcaaactctttcaaaaataaaaatagtgtgaactcacttgattcaaaataaaaatattgtgaacttgattcaagaatttgatttcgtcaattttacaaaaatgattgaatttgttttgatttcgaattaaatattttttttttcacttcaaaactatcttttagcggtgcttcaaaatggttcattactgtataaaaaatataaaagatgttaattattttcttcattaagtgaaatctgataaccttaatagtttaatctaatgattcttaattaacatgggtatccgatatcgttaatgtgttaagctgcaaagtaaaaagaaaaagatttaaaaaaaagaaagaaagtagtaaaagtgtaagggagaagaatgagctgaaaaaggaaggtggctagctagggcgaatgggaattggtgttttgtttccttgtgttgcgtttgatgattgatgatagagagacgacggcgttttcaggatgtgatgtcgggctgtcgggttcaatacgaataaaaataaattcaaagacagatatgtaagaaattaagtaaccgtacgaaaggagggtcacgcgtcttatggtgttggagaagagaaagaagaaagcgaatcacgattcagatttcacgactgtgactgtcacacatacaatatcaactgctgcatgcagctctgctgaggactgagtaaaactaaaataggcaaagcaaaagctggcacacttgcatgccacattatatgctatcatatcccaataatgcctagagaaattcctatctcttaaatgttacgtgtccatgtgcccctctctcagtccaacataattacttaccacttaattatagacttgtgtgcaataaagacttcaagtgcctggacatcgctttgactgctatctgccgtttccaatatcttgcataaacgagtatcattatcaacaataaatattgatcagatatacatcatactgaccatttattctttaaataaatggtttaaggtttaaattttaattttgaatatgaaatatatatcttaaacatattcatgattccaaaaacgattaattaagtttcttgactggaattactccatatctagattcaagaccatggtaaaaaaatgccacataaatgagcatcataaataataatttaataggacgacaggctattttagaggtgaaaagtggcatattttggagatttggtacagatgacataggctagaaaattttgaaaacataagtgggcgacaggctaatttagaggttccacattaaaatcagaagaaaagaaggaaattggttactagctatcaccaaactttatcaatgttaccttagcttgtcactctttatgtttgagtcgctgccagaacgaaaaaaattaagtatggtatgttgatattagtcgtgaaaaccaattgtgcagtgaacataatcgagtatgttatcaaagcataacaatcgattatgcaaataagcataatcgactatatatagtccaacagttgtttttaatttattgcaattttctcattcttttacatcaacaattttgacccaacaactcactatacaccggttacttattttttaagcataaatttttgctaaagatgctcttaacaaattgcaacgtacactcccctcgttccagcatctttttggcttttgcttcaggggcactcttcgtactggaaagtggaaatcaatgcttcttcaatttgtggtatagcttgaagccattcaagaccctcggggtagatggatcacaccctggattctttcagaaatattagggtttattttttggtgtgaagaaatgctaggttttaacaaatcacataaacacaaaaaatgaggtctttataattaaggccattttggtccaaataatgtgaaaatttcgaaatatattaaatttttcactcccatttttttcaactcttaagagtaaaattgttgtattatacgagaacataaaatggttcatggacgctcacaaccctataaacactcaaaaagagaaagagatagaagagagagaattataaatgtaataggtattatgacttgaaaaatgagataaagaaaaaataaaagatgataatttaattagtagtgactagtaaatactgtgtgtccataacttctgaaaaaattctaagctgcacattaacgcttttaatccgcagggtataacacgtgatggataaatttgcagttacttagggttataacgacaattatatttttgaaatattggaaactgcaatgcttccaatccacactatcagtatggcgcttgcatatcgatatattgtagataaagcaaagttgccgcaaattcagaacaatcaaaactagaagcaggagcattttagaattattctccaaactatatatatggtccccagctacattctactacgttccccaagtagcaaaatacacaagccattgacataaaaccaaatatggattgcagcagtggttaaagatttaggtttaacttcaagtctcgattctatcactaaaattttgcttaggggataacttttttcatagagatctcttgtcgtccaaagcctaatcaagtagcgacgaggtgataaaatcgtttacaattaaacctatatatgcattaatcttcttacgtagatctctctgccaatagcaccacaatatatgtatacacatgctaggtaatatttggattttttctttgttctatcgtttttatgagtaaaaaaagactaaaatatgttttatgttcttataaaattaaaaaaaaattcaattcttgttgctataactttttatatatatacttttagtctttataaaattaaaatgtcataatttaactcaaaattagagtaagttaaaatcaaacttatgtgtttaatgaatataggttggtctaattttacacttatctcgtatttaagtggacattcattatacatatagatttgattttaattgatctaactttgaattaaactataatatattttaatttaacaaaaacaaaaaacataaaaaagttttgtgggaatgaaaatattcttttaaaaattttataaggacgaaaaaatatttgaaaaaaaaaaaaaaaaaannnnnnnnnnaaaaaaaaaaaaaaaaaaaaagaggcagtgggcggagaaccagccaaggaggggggaggaggtggggagggatgaggggaggacaatgcggtggagttcatgcgtttggacgtcgacagagtagttcatgcgtttgaacatctgacgtggtttcatacatgtatcgctgacgtatccaactaacggacacattatcacgttttggatggagactagttacaggaatctcctacaaaacttttaaagttttagggatccaataagaaacaaaaaaatttcagggattaattataaaattcgaatatatttcagaaatatcaaacatattaaagcctaaaatatatcattaaattgaatataaaaagtacttaaagctactgagaaagaacgaatcaattttcttaatgtgaacttaaaataagtaccgaattgacatgaaataaatgtgagactacaaaataacactaatattaagtaaataattttcttaattttggtatagaaaaattataagacttagtcaaaataaatatcccttctattgaaaacataggattactatatttctctcttaatctaacaagatctctcaatatgtcttcttctagatgatcaacaatatctttcaattctcataaagtacagaaaaaattacaatttactctcttttatctcttttccttgaagagttatgtaagaactgtcacttattactattcttgtctaagatggatgggttgttaatgattcaactcctcacaagtctttatatacgtgtcttctttcaagatcaagggagtaatgaatgataattaatggtaacttgtaattttttacaattgttgatatcctaaannnnnnnnnnagatttgattttaattgatctaactttgaattaaactataatatattttaatttaacaaaaactaaaacataaaaaggttttgtgggaatgaaaatattttttaaaaaattttataaggacaaaaaaatatttgaaaaaaaaaatcaaacgaatccgggttactagcaaaaattcccggttggaaaatttagctttaaccaatatatatcaagataaaaatgcaaaatataactacttaaaacgcgtcaatatatctcatacgtactagatatatatacaaacaggaaaagaaaacaaaaagaaagaaaaaaagaagtgatcaatcacatacaccaaaacttaaaaggagcaatgacgtaaagtcctaaaatatgtagtacttccttcatggcaatgaacgaatactccccaacatgtgattcaaaaactggtaaattgggtcaagacaagccctgaatgggtttgcatgatctaaaaccctccatcttgaataggaagcagccctgttctttagcctttcccagaaagacacaaagcagttttggtttctggtcaccaacaacgccgcagattgtaggtaaaccgaagctgcacgcttcaccaactcgtttctgatagcaatggttgagtcaaagtcatttccctcatacaaggttaaataataccttgttggtgtgttacatataatgtccttcaggctcgtgtattgtatattttcaatgatttctgagtctctagcaactgaagagattctaggaattctcaatgaacgtgtgctctgaatctctcctgtttgtgtttccattgttaacaaaagccatgtgacgttgaattgcatgcaaatgaggccatgctgaagagtacaaattggttcctgcaaatattggaagtttttactttggtatgttgttgggggaaaggacaaaagggatgttcatgcattattaatttttatattaggtgcgataagatcacctttgaggcttggaaaggtatatagaaagagagacagagagagtttggtggaattactgattatatatgggtttcctttgatatagggaaatatttcccaaatagagggtcaaattgtacgcttatacgaacaagtcattattttaagtggtatcagatttgatgttcctttaaataagatctgggatttgaattttgtgaatgataaaaatgtgattaagaggatataatcacactaatgatgatcaactaaattttcaatggatcaacaaagccaataaatactctgaactaataattaacatcataaaaaaaattataaacttattagcattcactttatgaaaagaaaacagccatatttctgtcactaccttattgnnnnnnnnnnnatatatatatatatatatatatatatatatatatatatattgttgatatcatgtgaagccgtgaaggattcgataagacaatctgatgctactatggtcatgtccttttggactggacattaattaattgataccttgtctttcacaacaaaatttgagcaaaatgaaaggcatctcataggctaaatctggtttattgatcatattgggctgaaagagtgctgtttcatagcaacttggcccactttcctattatattgggctgaacatggccctcaaagacgttagtatatgaaattccaatgtgggaggcctaggaattttgagctggaaggtaggccgtaggactaggattgaagcctaatgattttccaacccatggactaattttaattagtttcattaaatctgagactattgtttcttgtactttcattattacttcctgtatattatggaaaactcattttaaaatgtaaattgttgttccttctgataaagttttcaaaattaaaattaaaaaaattaacttaagattaataatgtcttatgaaagattaaattaattaacttcattactgattaaaaaatattatgtatcatatcccataccaaaaacaatttaaatataattataacaatttcagtaaattatattagaaataatgtctaaaacgcactttaaccttcacaacatatatatgcagggaaactcaattcctcctgatgtctcattaataaaaaaaattatgggataatccccttgaaattgaatttccaatgtaatagctaattcaataaactcaagtaaaaaaaaaaaaaaaagcactaggcttcaaagtcatggctccacgacacacatgccagccaatttttctttttctaaaggatttcctttcctttatttctgcttcggtaggatccacaattccacatgcttgctcttgcatttgaactttacataaaatgggacctgtgagagtgtctaattggactctagtcactattaaactaaaaattctaaaaagtctaagaatgacgttagtgatgtaatttatcatttaaatatttgatttatcaaattgtgttccatacgttggacttttgtgatttcatctttctttccaagttggcaacttccgctttataagttccttcacttcatttttatatacacattttactctaatacacactgctttagtcagctaacttatctattgcgactcttttgttgacctatacagatatgtttaagccattaatttggataaggcatttttttaaggaattttggatgaggcattggatatattatatagtattaaacaaataactcgatctactatcgtattagtgcaaatgagacacaggtcagacaataatatttcaataatttcattaatttaatcaatttacgcttattattcatacacgttttcctcttccctcaagcaatataatcattcttgaagactaactgaagttttgaaatctccattaaaaaacaaattatcttcttttactattgacacttaagttatccttaaatgcgatttattcaaaatcgtttgtctaaactatttatttgacgatttgagtgttcatatatagtaagtagctagtgtttatttaccatgttttcatgtaatagaattattcgagttcaaacttaaagaaagaaaaaaaaaagaatataatgatcaaaatgttagatcacgtggacggttttttgtatctgtcactttttattggaccatttctcgggctattgttcaattttcattaaaaagatatttctatttgcttataagaaagataattaaaatgtatggaagagaaaagaatgaaaaaaattataaagaaatatttaaattaaataaagaaaaaaaaatacaagatccacacataattttgaaaatttatctttctttcttttttatttattcacaaccaaacatacactaaaaaaataagatccacgtgtttaatttactttgccgagtagtatattttttgcgaagttaattgacagtttcactttattatggttttacaggcattcatattgtttactcataaaacaaaagtaaacacaaattggaatatgatgatttgctataggatgtagatatggatgagacaggtatcaaaagggaaattttcttactttgaccgaatctgtcaactgtgtttcacatggaaatcgtaagcaacatgcttcatttctttcttggggttgagtttcgtgtaaacatttccttgtcggatgcctttcacccaaattgtagtcatcgcggagaatcttacttttgaaagcgaagcataaacgtgtacgttcttttgaatcacaaatgagcatttgtgtttgaatattaatttgatgcaatatatagaacacaaaacagattagaattttccaagacatatagatcgaaagttctttggcccatttgtataattatagctagagtgccatatatttgtaacacgcttaatgttggtagtttcttaaagatagttcatttttaaagtaaaatatatgtttaaatatgttggacatctctgcaatatacttgaattttataactgatatttgaaattttgttttttttttcgttggtttcttcaaacttcaaaagttttgtagaagatttttgtcattagtcctagtctaaaacatgatgatgtgtctattatttagacatgtcagctatacacatatatatagtcacgtcagacgttcaaatacgtgaactacatcgtcgacattcaaacgcgtgaactacaccatctcctcctcctctaccaccgtccctgacttcctcacctccccctccttccacgacttcgttggaaccatcctcccctcctcctccctcttcctcgaccagttctccacccctccatttttttatttattttctttactttttttctttctccatttgtcatattctcttcatcttctttgtgtgctggtgacatcggcatcgttcatggttaggtgtggcatcccgcaaggttttttctcttcacgacaacaaacatgaacacattgacttagatcatttccttctatctcttgctccgtgtcttgtattctcatcaacgaaaaagattgaacatcacagcgcatctacatcgacattgattcttcccacgtgtgagatgttactggacattggagtttttttaaaagaggttttgcctgaggatttggctttccgaaacaactagatcgacaatagggaggtagagtagaactttggagtctgaacaaccagatcaggtgagcacaatgtcgtttcgtcgtcaccatgtgcactctaaagcctctacccccaaccgaagcacctgccaaagaatgatatggcaaatcgcaaatgtgaagaggaaatgactcttttcatacctctagttaaaaacatgttattttcacccaaacaaatattttatagatctaagaacacaccggtaatgaagctgtaggaattggtgaaatgaaggggataacaacaaatggagaaagaaaaaagtaaaaaaaaaaaaaaaaaaagnnnnnnnnnnnnnnnnnnnnnnnnnnnnnnnnnnnnnnnnnnnnnnnnnnnnnnnnnnnnnnnnnnnnnnnnnnnnnnnnnnnnnnnnnnnnnnnnnnnnnnnnnnnnnnnnnnnnnnnnnnnnnnnnnnnnnnnnnnnnnnnnnnnnnnnnnnnnnnnnnnnnnnnnnnnnnnnnnnnnnnnnnnnnnnnnnnnnnnnnnnnnnnnnnnnnnnnnnnnnnnnnnnnnnnnnnnnnnnnnnnnnnnnnnnnnnnnnnnnnnnnnnnnnnnnnnnnnnnnnnnnnnnnnnnnnnnnnnnnnnnnnnnnnnnnnnnnnnnnnnnnnnnnnnnnnnnnnnnnnnnnnnnnnnnnnnnnnnnnnnnnnnnnnnnnnnnnnnnnnnnnnnnnnnnnnnnnnnnnnnnnnnnnnnnnnnnnnnnnnnnnnnnnnnnnnnnnnnnnnnnnnnnnnnnnnnnnnnnnnnnnnnnnnnnnnnnnnnnnnnnnnnnnnnnnnnnnnnnnnnnnnnnnnnnnnnnnnnnnnnnnnnnnnnnnnnnnnnnnnnnnnnnnnnnnnnnnnnnnnnnnnnnnnnnnnnnnnnnnnnnnnnnnnnnnnnnnnnnnnnnnnnnnnnnnnnnnnnnnnnnnnnnnnnnnnnnnnnnnnnnnnnnnnnnnnnnnnnnnnnnnnnntgaatgataattaatggtaacttgtaattttttacaattgttgatatcctaaaactcctaaatttcactgttgaatcaatgtgacagtccattaattgtggagaaattttaatataaatcgaccaatttgatataataagcatcccaacatttcaaatgaaaattataagattaatttagtgattaaaaataagaatttaagagttaaaaataaggaaaagaaattgtgaatttgaatatctcgttaatattttaataaaaactcgtaactaaccaaacttataggaatgatgactgataaaataaaaataatgtcatcatgatgagttgttgaaatgtccattctatgactatgactatagtcgttaccattagtaaaaaatgttttgataaagtatataaataatattatattatcatctaataataatttattatttataatatatttattaatttatataataattattttaaaaattatataaatgtgatttatgattacataatattttaaacttactttacactcatattattagactttataataaagccaaatcaatataaaagaaagattaatacatgtaattatgtataatctttaggcttagctttctatgagggatcacttttggcgcagaagactattaaaataaataaatggtataccatttgaataaacaacaaaagaaaacaattatcgtagtcaaattttttgtttaagaagaatgggattatcttcataaagaaagcaacaaaaggaggattataatattttataaaaaataagacaaaaataaaagaaactgttatctcaacaaaagatatttatgttctagaaagaaaaaaacttatcgatatattttattgttaaatctatacatccttcaaaaaataaaaatataactccaacctggatgtagtattgtccgttgttatacagggaaaacactccaacctggtgccctgttgtcaaattcttgcattacgaatctcaatactatattacccatttcaaaccatctgaacacctaagtttgtcagcattcaaatgcacaatccatagtatattattatagtctttcgtccacgcttcaataaatcagtagtctttgttttcggagaatatcataatttttttctctatgctgatgagtgatgacaaacccatatcatatctcttgaagagctaaaaggtccagagcttcagtagtgagttgacgaaatgagattaaaattgtcaagataacatgtcatgttttcttttaaggaatacctaaaataacttgaaatatacaatacagcaaagtgatacaatgaaaataggaagaaaaaaaagtgtattagtaatctgacatttggataattagttatcgaggggaattaagttactactttactctacatctctactctttattttcaattttaatataacacttaaaattgatgtcttagatcttacaaatcattcatttttataccaataaatttatctattcttatgatatatcatatttttagcatataaattagacaaaaatatttaaaataatatataattattaattttactgagaatatttttttcatatttttgtattaagaatattttctggtcgaccgtcggagattaagtcctttgagaaataaataagtattatgcctcaaatttacaaacaaatatcatatattattattatataaataaatatcgtttatacatataaaaaatacttaacaactttttttaaaatgcctcaaacccagaagatgcacccaaagcagtaccttgatcaatcttaagtattgtaagagcaatatatttgaaggttattgccaagccagaaattatatttgttttaagagttgtactatcacaaatttgaagctccgataaacactctatatatgtaaaatattgaattttatagcatttagatttatactttttattttattttaaatgataaatatcttttcttggaatgtagagtttgtataaatccgaatttaacttttttaatggtcaaaaattagtaatacgacgaatttttttaaaaatcctttcaagaaaatatgtggtgtcaatgcccggtgcaagcttaagtccccgccgtctacgagagtcttctccagtcgtcagcccggcaagataagaatgcataagatagtagtgatggactttgacttatcactactaatttccacataaattattctaattttttttattctctttttaactcaattttcatttcccttttgtaacttctttttgatttattagtgcattgttaagaatattttagaaaataggttaaaaatatttttaaaaattgaaaagcatttaaattcttaaataaatgataatcaatacattgaataataaataataaatacattttgttgaatgtttgtaaaatgattgaatatttctctttttggatcaaaactagacttgaaattcttaagtaagagtttaaggtttggggattaaaaaaatttaaaaatatgattagaaaaaaattaatttatcaaagaaaactaattattaataaaatcgagaaataatctgtattaacgttataataaatcacaaaaaattaattatcatgtatttacatctaatttgagagtttgtataaagataaaaactcagtttttattctaaccaatgatttattatgagattttgtgtaaaagataaaaactcaattttcattcaaatcaatgatttattaggaaggattaagtagttttatattgtgagtggcataagcgttttcttattaaatattttaaatacttttatttttcggtaaaagaatctaaataatacaatttaaataaaaaattacgaatatgagacttttgacaaattatttacgaatctggggcagtgggtcgcgcccaaaactgggcgtgatcggtcacgcccaattttgggcacgacccaccagatggcgacacgtgtcatgacagatggagcgatgcgtatataaatttcggacggtcataacttttgattgggatgtccaattgagatgaaaccggtggcgacgcgctcgaaattgagaggagaagccctaggcactaaagaagctaaatggtattttttccaaattatttacgaatttagggctgttaaaaaaactatttacgaatctggggcttttgacaaactatttacgaatctggggcagtgggtcgcgcccaaaactaataccagccaaaattaatactttgagggaatcagttgaaatagaaatcaaggaagcagaggccacagataaggtcagcatagtcaaaatgctgaaaactaaaactgtgagaagaggtttgtatgcaggaatgggccttcaaattttccaacagtttgtggggatcaacactgtgatgtactacagtcctaccatagttcagttagctagttttgcatccaaccgaacaacacttcttctgtcactagtcacatctggtctcaatgcatttggttctattttgagtatatacttcatacacagaacagggaggaaaaagcttgtgttgttcagtttgtgtggtgttgtgttctcccttgttgttctaaccgttgtgttccatcagagtacaactcactccccaattgttagtgcacttgaaacctctcacttcaataacacttgcccggattaccattcagctgtgaaccctggtggatgggattgcatgaagtgcctgaaggcttctccagattgtggcttttgtgcttctggagccaataaggtaaacttgtcctattattatatgaatttgtttaggtttaatgttattttgattcattttatttcttgttttgttttggtatattaagttttaaaaattttattttaattctttatattttcaaaatgtatcattttagtcatttttttaatttttcattaaaaacattaatgttatgttaagtttaaattttaagacagtttaatgtcatatttttaccgattatgttttatatttgtttcactttgagataaaatatgatatctaatttattgctttttattgattgaatgaatgtctattaaatagacttaaactaaaatagaagataaaatcacaacaactaactctatttagagaaaataaaggaatactagaaaataaaggtaacaacatagcaaatatcctataacatcttatacaattagaactatacaactatacaacaaatgcataagcgtctctaactctttgatacattatgttttaaaaatttcattctagttctttatttttcaaaatgtatcgttttgatcatttttttatttttttgttagaaactttgtgtttgtccgcgtttaaaattttagaaaagttaaattaacatagtgacaaccaaaaatcatcattgtctttttatattttaaaaattaaaaatcactaaataaataaagaaaagatagatctaaaatcacaaacaataatcacattcactctcatattattattagtataattgtcttcattcaatttaatcagttaataaagataataatattattcactaattattctcaatcacaacaggtaagggactcttctcctttagccacttcgcctctagtcgtcaacccaaaaagatgtcaacgagattatgtgttgatgttattccatttatgtggtattttattttttaccttttcatatctaaaagagattggaaatgatgataatttttttatttatttatttttttaaaataaaagaaagataataatagtttttagttgtcactaagtaaagttcattatttaaaaaaatttaatatcatttttggttcattatgttttgcagttggttcgttttggtacattaagttttaaattattcattataatcttttatgttttcaaaatgtattattttagtcatttttaaaaatttagaaattaacataacactaatatttctaatgaaatactaaaaaaagaatcaaaacgatacatttttaaaatataaaagattagaatgaaaattttaaaatttaatgtactaaaacaaaataattaccgaccataataaattaaaagtaatattaagccatttgtttattatattggcgaataagctaattagaccatgaaaatattccatcttgcaacttgttgcttgagtttaattattacaagttagtctccaatattacaaacttcgtattaactacactcactagtatcagcctaatggtagaggtttgaacagtataaatgagatcataaattctaacttctgtgtgatcattgtactctaaaaaaacttacaccaaattagtcattttctttatcacattttaactcctttgattgagaaggattaagtttaaattttggtaaattcatgaactaaactcttatattgatcaactctaggaactaagttgtttatttatccaaaaaatgatataatcttatcattgagttgtaacacttgtacaaattgtgtgcagctcttacctggggcatgtttgatctccaatgacacgacaaaagatcagtgccataaagaagatagactatggtacaccaggggatgtcctagtaaatttggatggcttgcaatagtagggcttgcactttacatcatattcttctcacctgggatgggaactgtgccatgggttgtcaactccgagatttatcccctaagatatcgaggaatatgtggaggaatggcatctacatccaattgggtctcaaatcttattgttgctcagtccttcctatcattgacacaagctattgggacctcatggacatttatgatatttatattcatcaccatagctgccattatctttgttattattttcgtgcccgaaaccaaaggacttccaatggaagaagtggagaagatgttggaaggaagagatctcaacttcaagttttggcagagaagttctcactatggagaagaagtaccaacaccgaagactcaatcaacttaagtctattgtgttgtatcatttgtaatattggagtattaactagggaagtataggtaataaaatcgtagaatgtagctattagattctaagtatatacaatacttgtttgtgtgaattttttttcttatcaacaaatattattttattagttttattagaaatatcgttcaagaaaatttgaacttctaatctttttcctccttccttcatccttctccgatcaatgagccaaaaccttatattatatcttctaccttggttgtctgaatgttacaaattgttatctgggactcttttcgaaggaccaaagagttttattttatgaaagaacagatgaaaattcatcagggaaaacaattggctactgttattacatctggcataagcaggggagataaggaaaggtgaaagctcctcaacacacagaatctgacttagtaaaaaaagataaaatcaattcggtcctaaattattttaaacagtttaatatgatctttaaattttaaaaaaattaattttatctttaaattcttaaaaatgaatcaatttgattttcaaattttttaaaaattcaatttaatccttaaattcttaaaaataatcaatttggttttcaaatttttaagaatttgagaatcaaagtgaacaatttaaaataatttgagagatcaaattgattcatttttaaaaacttgaggataaatttaatcttttaaaaatttagaaactaaattgaaccttttaaaatctatgaaccaaattaaatcattttgaagaacaaattgataattaagcataaaagaaaaaaaaaattggttactagtacaaaataagttttaatttttctataatcctctacttgtcttccctattaaatttgacatatttcccttattagattcgtgaaacattattacataaatctactgatctgaacatgatggtatttgaaaaaatacatttctctaacatcatgttgaagcagtattgaatacacacattacatattctcacctcatttctctctagaaaaaaaataaaaaataacttcctctttttgtttgttttcacggacaatctgtatgatggattgctagttttttcttctttttttccccctatttaatgccacgttcgaaccgacattccaatggttgagttattggcaaaccacaaaactacaactaacatggttgattacaacttaacttcgtgactactcgttaatattagtataatttatttgatactgatagtagaagttattatatttaggacatgctttgtaattataatgaataacaacaaaaagaaaaaggggtcatgtaacctttgacgatatatcaattttaaaacgtgtgtctaatatttcactattcaaaacattcttatgttaaaaatcttcaatccagccacatgtattaaatgcttttagaagttaaagaagtcacatgtgtcaataagtgagtaaaagattataatttatcagaagaattggaaagaagatataccaacaactcaacaagatagtcaaaagaagtaagattttttattctttttgtcaaaagaaactagatttgggagtagtatagtaggacacaggaaaacaagattcggtacccaactgcatatttggttgcgctaaaaaataattaaatattatttttggtttattatgttttaatattttttattttcgtatattaaattttaaaagttatattttgattttttatatttttcaaaattttattttcatcttttatatttttaaatgttttaaattttgattttttcttttgatttttattactaaatgttagtgttatgttaatttttaaataattaatttgaaattgcatgatttaaaatcgaaacaagattcaaagtcactaccacaacatcaaatttgaagcttttcatcatcattgagacccaatattttaaatctatattggtgttgagtcatagtatagctaaagggtgcatgatgatattgtttagtagatggatgttgtaaattgttgatgatgattgtagtgttgaggaggttgtagatatgagtaaacatggttgcataatttatgttgtggtggctatagattttgcagaagaatatgactgaggttaaaaaagtaagtggtggaatgcattttaaaaagacagttgtgctatttagctaccacaattttaaattaatttttcaaaatctaaagttaacactttttttgtaacaaatacaaacgttagaataatttcaattaactagattcaacgaatatttttaaatacaaaaagaaatacgaatataaatttaatatataatctaatatagtataatatttctttaggatatttacattatatctatatatctatctatatatagatagatatatatcgatatatatttctaatagattctaagggaattctttaaaattcttttatttaatgtttagtaaacaaatattagattttaattgattctttgaatctcgacaatcgactaaaaatttgttattatgatttcgagtaagccgctatggtgaaattggtagacacgctgctcttaggaagcagtgctagagcatctcggttcgagtccgaatagcggcatgacatcttatcttctaaaaaataggtcctataatgaactccattcttatttctannnnnnnnnnaggacaatttaataattccaaagaaaatagacatattatttcattaaaaatgatatgttttgttacattaaacaaatgacatatttaataatttcaaagaaaatattataattttttattcaatttactcttatgttaccatctattattcaatttattctcaaaaaattatataatataaatatctatatgtaagataagcatttctcaaaaaattatataatataaatatctatatgtaagataagcatgacaacaagattaattggagataggtttgactacccacgttatcatccgtgcatatatgtccaagtttaaaagagatgggttaatattttttaaaccaaatacatcctaattgagtttcatcaaatttagataaaactgtgaggaacccatcattttttttataattttaatttacttatatatttaaaaataataattttataatgataattttattttatattttttctcttaaaaatgatataattttattactatcatccattattgacaaaataacatttaatattaaaatttacatatatttttgttgtttattaatatactaacatttagtttcatttcctttctaatttgnnnnnnnnnnattcctagtatttagattttttcattatatatggtattttcaagtttagaacatatattaactcatatatcgttttcggtcgtatctattttaatttcaattcatttgataaccttattatttgtcaatgaaatcataggattatctgattcgtccaaaaaaggcatgataatcacttttttttgtataacaggattgttagttactcgttgggttttttcaggccatttaccatttagtgatttatatgaatcattaatatttctttcatggactttttccattttttatatggttccttgcttcaaaaaacctaaaaacgactatttaaatacaataataacacatactaatgtttgctaacatttttaagtgttttttgttttcactttcaaataaaacataaaataagagtgaaaatatgtatagaatttagaaaatattttatctaaaaatattttcaaaagtataccaaaaattaaaaataacaaatcaacattttcaaccttttctaaagaagtgaacacatgatgataccttagagtactttcttttttatacatgttttttaaatcttgaaaatttgaaaatgaaaattattttcaaaaattaaaaatagaaaatgaaaataaaaaataaaaaataaacactcaaatgaagcgtcatctaggtaaatgatcaaaaattgaaatgaaattttcaaaaacataagagactaaaataaaacttttgaaaacataaaaatcaaaatgaaacaacactaaaatataatggaccaaaataaatcttttaaaatttaatgtatcaaaatgaaataatattaaaatataatagaccaaaaataacatttaacattaaaaaatacattatatgtaaattcaatttgcaccaatgtataagttttaaaaattaaaccaatgatcaatccaaccaaaatattaaatcattagattaatggtcaaattagtaagtctgtattaaaaaaaattaaaaatttccgacaatgaagattgttttgacagagttgtccaaccacttaaccagggtcacacggttcctaccgattcgatagcatgttcgatccaaagaaaactcggctcagttatccctcctattctcgtttcgaccagctaggccgatcctattttaaaactatgcgcaccaaaacgtgaggtcatggacgaaattatggttcaaagatattaaaatgctttgcacacggtggtgatataactaggaatctttatttaaattttattcgcaataataaaaaataaagtaaattgaagattaataaagcattccaatcgtttagttagtagtggaggaaaaatgcatacaataagaataataagcattgaaaaacattgagtcttcaattatatgattctactccagatagtcctctaccacatttcattctgctttgaatatggctataaaatagaggtttatattgacatgtctgtacttgattattctctttcattaacttaatgatatttcaaatcaattaaatttgtcactttgtcaccttaaggcagaattagtgtttggctttattatgatatatcactgatctgtgaatcgtattatgatgaattatccaaagttacctctgtgatgagaccccagtatcattcagaaagaaacagaaaagaataataaagtcaaaagtattgttcacttgaaagaatcatttccgaaattgaactttgtctcttattcaaaacaatggtataatgcttttcaccctatactcactcccgtgaacacattaccaaaatggatcgtttaggatgccaattcatgcatagaaaattcaaactttaatagttcgagccacctaccaaataattagaagaaaagagaatatagctcacggcttgaagctcacctatacacacacacacacacacacgttatatatatatatatatatatatatatatatatatatatatatatatatatatatatatantgatgagtactcacctacatatatgcctgcaaccaataacaacactctatgctcaaaacaaagatcctctcttttattgttttttatttatctattctttaaaggataatatataaattaaaaatataattaatatcttatttaatattaattttttaaaaaactcaattataatatactgatagagtaaatatttagtaaaaaataaaagtgtatagaatattttaaaaataaactagagataaaggtatataacaatatagaaagataataattaatatttctctttatatacaatttagaatagttaatagtgttttttgttgttattctttaccgatagcatttttaattatttttctttgacaagagtattatttttagatatttttcttatcctgttaactcttttaatatatcatttttaatatttttaattataacatgaatttcaatattttaaggctgactttttaagaggaccttacgacatcaatttccttatagtaaggttgatttgaaaaaaaatatataataccttaagaaatcaattcgtgatatatgaacagtaaattatatcacgtatgtaaataattgttaacctgtattatcatttaggtaagtttttattttatttgtattatttgggtcaaaaattcgcctatacgtcttccgtttggactgcattgatcatcgttttcgcattaaataacaatttattgcgttttgataaagctggatatcactttccttgatttgattcttcttcttctttcttgctcgatatatatcatctatatcagagtaaggacaaagggaatcaacctagatgggggactgggggagtacctagacccatatatagtttttgttagggtattattcaaagtccagatcatgtttgttctttgcctaaaaatttcacccacttcacagttttacaatcaaacaaaaattttactttttggagcccaatggtttaatagggggtttgcaataataggtccattagggctataactcccactgtaccatctctgtctcctcttccatatcttactaattttcagaccattatttatctgtcttttaggcatagtcacagttttttctttaaaaaaatgaaaaatgctaaccaatgttctatataagaatacgggttaaagaagtgaaagtaaaaaaatatatattgagatttgtaaaaatacgttttcttatgatatttaaattaatgtactcttgtatgcacacacacacacaaattaaactaaaaattgaaaatctattttaaaaaattcaaaatatatttgttattgtattttttgtttttgaatcttgtgtgtcaatttgataaggtttaatttcttcgattaataactaactgtcacaaattaatctacaactcaccttactataatattatagattagtacatggtgtaactttcccagctgcaaactaaagaaacaactaaaaaaactttaggcaatataataaagaaatacttttgatattttaaaataatagtaaaatagttatttactagttctcttagagtttaaattaatgattacaagttaaaccctagccaagtttaggaaattacaaaaatatctttaatatatagaagaaaaaaaaaggacgtaagataatgttttgtgaaagaaattgaaaccaaatataaaataacaattttagagaattgaagcaaaacagatcgatcttaattttagttgataaaccatctcaagttaagatcaaaataatcaaatatgaatggtcatattttgaatgtaaaacatctcaaataaatacaaagaattttaattacttggatgtagtttataaaaatgagaacatatgcttttttccctacttttttttttttttttgcaaaatattcacttttaatcactaaacagnnnnnnctcttcaatgtctctataaaaaagctaaaattaaaggagtgtacataatacatggccctctatttctcctttctttcctcttcaactcccaaggattatacatacttttccattagcctcacagtggaaacactccatggttcttaatgcttttctgaccaagtgcttctcgttggcctttgttaacccactaaaaggacatacataattgtaagtgtaataattatatatatgcaaatagttgtaatattgctattatttcacttatatgatcatgcatgaaagggaccaaactctatctaaggggcacaacacatggaggagcaaaaccttcggaataagcatacaatgcattcttcaaaccaccggagacgtcgcgaaattgtggccactatgggaacacatgtttccctctctgaatgtggctggcacagtacaaatatatatatatatagcaccaccgcattactttctgtcagtattgtatcacactatcagtaaataaattgtccttgcgatacatcttatcattttgttaacaaaaattattagaggatatatttcttcaatgttggagttttgtagattaacattgtttaattatttgattaatttttcaattattaatattaattatgtaaataaaaatatataacatatcaattaatgaatattagctagttatttggtcttattatatatgtgagcatgcttatatatcatgggttggaccatcgagttaatgctctcgtttagtgtttgtaaaattgttatttcattagataattttagtgtgacacaacattttgcatgtgtgaaaaacttagctgctagttagagagtagtatttcctcatttggtgattcaattgagctaatagaagatgaatttcatcttcacttaaggtactttaactaaattgttattatttgtcgtgagcatgctagaatatcatttgttattaatttgtcatcattttttaattgtactagtttatatgataaaaaaaagaatgaacttagctctgcaagcattaactgtcaggaggaattttaggtctctagcttgtagctacatagcaaataaaaataagattagaatagtttttttcctctattttatttttaacttttgatttggtattttattttttattggatttagtttgattctctaattttaaaaattagttttctttattcttctaattttttataggttcaacatgattctctaatttttaaaattgattctactatctaaattaattgaatgatcatattatttaaatttcatcctatcatctaattggatattttgtgactatttaaacagtcataaaatataattttttaacacagttaatccattttagatgataagatcgaattgaatgattttaaaaattaaaagatcaaattgatcccaaagaaattataaaactatattaaatctaaaaaataaattaatttaatctaaacataacaagatattgttaacctgcaattccctcatggttagtttcataaaaactgcaggttagatgcataaatattaaatacaagtggggcgcactacacagaagcaaatacgttataatatactataccctagcttagaaatacctacgtacaagaaatggtatatagcaaactaacagcttaataatactgttcctacttattaataacaaaccaaacagcagttacaactaataacaaacagaaatatttgaatttgaaaataatataaaaacataacacagaataactataacagcagtgcgctatcttagctgatcctaacaacccttatcactccaagaacgaaaaactaaatttgcatgatttatattataccctagcttgtatcttctaatttacttctgttttctgatttctcacgttctttgttcctttcctctttttcaaccttaatttactgcgtaattacatttttattagtcacgtgtctctgagaggacgatgttaagaaatttttagccaacatgagtcttctccaagaatttggtcctaagaaatgggatcttcctcctgcggccgttatgagttgttgagtgctacctacgtgacctgaatatattttcagtgaattttcaaatatcattatagggtgataaaattttcctggaaatacctatagctaggccagttatttcttaacttaaaatccgagaaaggaaaaactaaaaccaaattttaaaaaatgaaattcacggaccgaccgtggtaaatttgtaatttgcaaaagtgcatctaatcaattaatgctcgcgaaagaactactgttaatttctctttcgaacatgggaaacaccatcttaaattaattattacttgaacttgaagttatgaatcttgtgcacgacaacctattcaccggagtattggataagaatggagaaatatagacaaattaatctacatgagggatacaaataggagggagaaccccgcaagtatacatatattccttaaagagaaaagagaataaagaggttcataaatgataagaaaacaatataaagtggtcatacttcatatatatatatataataataataataataaaatagagtttgtaagtaaataggtcgcatttaaaaagcttgcataacattatatatttttcaaaatatttttaaaattttgttaatctatgtgtaaaaaattatccaacagtagtatattgtagtatagaactttagttgatctggaattaaaaaaaaaaaatgcatatgggagtcatattataattaagaatgttcaaacttagagtattaccgctagttttatataaaaaataaacagaatataatattcttttgttttagttatatgaaatagacttattttctaatnnnnnnnnnnatatttttcaaaatattttttttgcatataataaaattttattaatctatgtgtaaaaaattatccaacagtatataatagtatagaactttaattgatctggaatttaaaaaaaatgcgtatgagagtcatattataattaagaatgttcaaacttagagtattacctctagttttatacaaaaaataaacagaatataatattcttttgttttagttatatgaaatagacttattttctaattgttatgaagtatgctcaagatacactcacacatttttatataagtggatgtcgttttgtttaaattaaattttagtgaattttttttatttgtaacaattttgacatttcaaaactcatcatattcaatagcagaaaaaattatttaataaattaggaataatataattacatatagtccttagttaaaatatttaattctctgagtatttttaaaataaaatatgttataattaaaattaactaatttgactattttatatgttaatattcatatatgggttttgatgaatctgttatttatttcttatataatggatgaaagatagtatatttctcactaaaaaaaagtgtaacactgactcctagtaaattcggcatcattgtttggataagaaaagggtatgtaacattgactcgtgatacaattcaatttataattttgaaagcttgatacgaacctcttaatatgagaaaataggtatttactcgtttatcattatatgcaaaacaaccaaattgtagttatccacttttctatagcatacaacaaaaagtatcgtcattattgaatggtgccccttacaagatcctttcgaacaggaaaaattgggccaaagccaaagaaattcgctctcccttttctttttcccgtctttctctttaatgaatacattcgctctcttttgtaaaggcgttaacttatgaggcaaagaacttgtgatgaaccttcttatggacctaaagttcttaatggtcacacacaatcaaccccacaactttgcaccaagctttatggaaataatacaagcctttacctcattcctctaccactaatgtagcactttcttgtcttcattgtcataaaactttgcctgcgttcttagcacttcgccatgaggtctctttcttgccctatcaattcttcatgtgaaaaaattcaagacattcccttatccttctatttttattaaccaaaaccatcaaagatgattggttgctgtcattttcttttcgtctttacctagtatatagttaaaaatgtagaagacaagtcgatttttttgctacaacgaaaccaacacacgtggttaattaatttcttgtcattttgatatgacaaattacaggatatatatagtgaaaattgtacgtatgtatgtaacaactgaacaatcaattaacagtgtgtattagaaatccacttagtccaataagtaacaactgaaaatagacaatcaacagcataaatatataaaacaaatgaaccaatttttttattaaaaagaaaaaaaatagttctaacccaactactttctattataactttataaaaatgaagattgtcactttgttgtcaatttgttgactttacctttaagaaagtttgaagaaatcaaattgtaccattgtccggggggtctacatggagagcaatgtgagcaattacggtgataacttagactttggagttactacgagtctaaaaaaattatatataattcgacaatatttttatattatttttataaataaattagaatcattgtctcctttcatatctcatttttcatatatcttatattaaaatatgacgcgtgattaaaaagtactactctttaagttgttagtttcttttatgtattattactacattttataaactatacgttaaatgaatttatagcttattatgacatcaaaatataagaaacctatgataatgagcaaatttaaagtgtttattttttttttccaacaagatgagaaataaaaactaaaactcaaactataaaaaaattactcaatatgttataaattaaaatttcaaacttggataataaagctttcactctcctctcctatcaactagagattttcaacattctatcttccctttataatatgtgtattttctttttaaaagtttataatatgtgtatgttacgtacgcactttcattacaactacgcagaaaatatatcccagtcatctcagattccctccatttatctttttattacgtatatttgactttcttaaccacatgtcgatttcaacttaaaataatcttatattacaatttatttaattgaattacttatctcaaattaaaatatagttaatatattcaagaatatttgtttattataaatattaattataaattatttataaacnnnnnnnnnnnnnnnnnnnnnnnnnnnnnnnnnnnnnnnnnnnnnnnnnnnnnnnttgttatggcagatttaaaaaaaaaaaaaaaacttcagtttaattcagcttgcacggagtgaaattagaagtcacattttagctcattcaatttcattttaaatattttattttatatttaatataaatacagttcaatatattcgatgagtaactcagctcgatgaatattgaaccgatgatgcttcagtaactcaatatccttggctcgttgccaaaatgattattgggaaagttgaacgcaatgcttcatacatacgatagacatgtaaaaaattggtttttatgtacgtgtttgatattgattttaagtatattttcacatatttgatttaaagttaaaaagaattcaaaattgattctaaatacaaaattgattttaggttgaaacaattttaaatatcatccaaaattttatattaaattttaatgctaacttaattttataatcaaaatccaaacataaatcatgttacttcaaaattaattttaatcaaaatcaattttcaaaatcaattttattgatgtttatccaaataaacacttaatgtcacaattcacaagaaatgagcttaggtaacgtgcaacaagatttccaaaaatggcacacatatatattaaatggaagaagttgagaactccttttgttgtttcggtgaagtgaacaattgcagctttcttgagcgtattacagttccggaacatcttcatttgacaatgaaattgcacaaatatttctgcccccccataatcaaatgtaaggaaaatttatttgtggatgctattgacgtaatcgtgagttccagttcttcattgattgcgacgtgacacaaatcaagcatatcaattctactgttgtaattatggttttaaaaacaggatcgaagtgatcagtttgatcgaaatcaatctaatgatattaaatcttaaaaaataataaatccataattggttaattgaatgttaataactaatatctcattatactaagattcatttaaggactaatatttattaatgcatatttccctctaaatgaagactcaaattataataattcggtgtatattatgaaaggacaattctttgtgctaaattcttaaatataacttataactactttataacttataattcttttttatttatatcttcattaatttacttgaaattccttttttacttttttttattattttagaaatcctttttaccgatagtcatagagaaaaatcatcaaatcttttttataaaatataaattttgaataatattactatcctaataatttttaaaatgacatgctattataaataaatttaaggctaaaatagaatttcggtaccttatttatattctaagtttcaatttagtatcttatgtttaaaaattttactttcatctcttatagtatttctatcagaacaaatgtcattttgttagttttttttactaacagtatcaaatttaactagtgtgtaatttctcatagtttggtaagtgtcaccaaattgatcaaattagtnnnnnnnnnnnnnnnnnnnnnnnnnnnnnnnnnnnnnnnnnnnnnnnnnnnnnnnnnnnnnnnnnnnnnnnnnnnnnnnnnnnnnnnnnnnnnnnnnnnnnnnnnnnnnnnnnnnnnnnnnnnnnnnnnnnnnnnnnnnnnnnnnnnnnnnnnnnnnnnnnnnnnnnnnnnnnnnnnnnnnnnnnnnnnnnnnnnnnnnnnnnnnnnnnnnnnnnnnnnnnnnnnnnnnnnnnnnnnnnnnnnnnnnnnnnnnnnnnnnnnnnnnnnnnnnnnnnnnnnnnnnnnnnnnnnnnnnnnnnnnnnnnnnnnnnnnnnnnnnnnnnnnnnnnnnnnnnnnnnnnnnnnnnnnnnnnnnnnnnnnnnnnnnnnnnnnnnnnnnnnnnaggacaatttaataattccaaagaaaatagacatattatttcattaaaaatgatatgttttgttacattaaacaaatgacatatttaataatttcaaagaaaatattataattttttattcaatttactcttatgttaccatctattattcaatttattctcaaaaaattatataatataaatatctatatgtaagataagcatttctcaaaaaattatataatataaatatctatatgtaagataagcatgacaacaagattaattggagataggtttgactacccacgttatcatccgtgcatatatgtccaagtttaaaagagatgggttaatattttttaaaccaaatacatcctaattgagtttcatcaaatttagataaaactgtgaggaacccatcattttttttataattttaatttacttatatatttaaaaataataattttataatgataattttattttatattttttctcttaaaaatgatataattttattactatcatccattattgacaaaataacatttaatattaaaatttacatatatttttgttgtttattaatatactaacatttagtttcatttcctttctaatttgagtttttggttatgtttcttcttttgttaattttttttaaatctgtttttaaagaatatttttaatctattgttatatatctaatacatgtttataagttgaaaagacactcagtatggtctgatgaagataatacataataaaaactaacaaccagtatgataatacctattaatcatatgtcatatcttaatttgaacaaaaagatatatgtaaaataaaataataacttcaatctagttattaaaataacatcaaataatattgaaaaattattatacaaccattttaaaaaaaatttaaggtcttttttagtcattgatcttgtgtcgtcacacctccaaatagggcccaagatcggcattggacccaatttgatgtagatgacattcttcaacatattcatcgatatctcatgagataaaccttagagttggcaacccatggcacatttcccatcctaggcgagaagataatataacatagaatgcacatgaatttgtcaatgtccaatagttttaaaaaccctttgcaattaatgaaagactaaatgataggagcaggagctaatcaaagcaaaaaggtttttcaaagctaaatcatggaagataaattcaacaaacttatatggtcaagatgtagctatggattggagtttatttgaatgaattactaagatagtgtttaatttatgtgttttctattttcatttttaaagaaaataaaaaataagagtgaaaatatgtttgcttgaatatattttcaaaaacatatccaaaactaaaaacaacaaatcaatcttttctaatgaagtgaaaatgcgatagcaccttagagtattttcttcttgatacatattttctaaatcttaaaaatttgaaaaggaaaattatttttagaaaataaaaaagaaaataaacattcaaaccaagcatcacctaagttttttggactaaagaatcaattaaggcttattttctaattttacatgaattttcatattnnnnnnnnnntttagaaaataaaaaagaaaataaacattcaaaccaagcatcaccttagttttttggactaaagaatcaattaaggcttattttctaattttacatgaattttcatatttaattttgatgtaataagtttagacgacttttaagatgtttttggccaacttttatgaattttaggcttcctaatcaattatgaaggttagtgagaagtaaatgcttagtgaaaatgcatttcctaatgggaagtaaagatttagtggactcttagtggaaatcaatttttcctagtaagaattaattatttagtggaaatgtgaaatttttagagagaaatttaacctataaatagagattattttataactatgaaacaagttgagttggaataaaatctgaatttttttcctttaattaattttaattgtattaacaaaatttatgatgatcaaacatatgactttcatttttttttctctctttatgtggcgccaatatccttcctttaaaaaaactaaaattaattcctaaatccaaagtctttaaaggcaatctatgttgtttccatgtttgtggaagctcttttttgcaagtcatccaaatttacaaggtgacattgagttagttaataggatgagggttgcccccacttatatataatatcgtaccattatttatagacgatgtaggacttagatttcttccaatatacccctcacatctaacaatttttttagcttggtgcgtggataaaatagtgagtaatcctttaataaattaggataaactttgatattatcttagaatgtagattttggtctaacttaatcccaaaagataattcataagatggtgattgtctcctagatatgtatataatttaccttgattttatctctatttaatatgatacttgaatttttttaatatgtcttctcacttccaacataagatatataagtagggataaccataaccttatgaactaatttttgaaattaaattaaacctcaacttacattctaagaacataaactataaattaaccaaaaaaacttatataaactaaaataaaaaannnnnnnnnnnnnnnnnnnnnnnnnnnnnnnnnnnnnnnnnnnnnnnnnnnnnnnnnnnnnnnnnnnnnnnnnnnnnnnnnnnnnnnnnnnnnnnnnnnnnnnnnnnnnnnnnnnnnnnnnnnnnnnnnnnnnnnnnnnnnnnnnnnnnnnnnnnnnnnnnnnnnnnnnnnnnnnnnnnnnnnnnattgtaataacaattttggtggatatcatattcctttaatcgaagatgatattaaatttttatggcatacatattgatgaatacaaaaattaaattaaaagaagatgatattagaattgtcttgcactttttatcccatattttattttattttattagaattgtcttgcatatattttgttgtatatatattcatcaaaatctataaggacaattttaataaaaatttaaaaaatgtgagtaaattaattaaagtattgatgaattttttttgtgtgttcttttttgggaattgaacccagtccattatggactaattgtaaaacaattaccgtacaaaatatgtattttttaaaaagatataatgtgatatttttaaaatatttttctaatatcacataatgatccacaactttaacctatgattattaatttgtttctcatctttgttgcgtaaataactaattattattttttagcctttttgttaattcattttattctttatttttctattcaagaggttttccatttaacttttgcacaatcagttttaaggtagttgtttgtaacgagtattgtagagtaccaatacccttctatatacataaatacattaatcaacttccaaataaaaattttggtttcctaataaataaacaaagacattttttttaaaaaaatatgattttttatgaatatttaattttatttttaattttttattcctttcaaatattttttattttattttgactaataactagtccagagattttctttatctagcgtttgaagtctagattgtaaatagagaaatttatttgagaaaagtaatttattatggaatttaaaattatttaatttaaaatttattttttggatatttttatacgaggaatttaaattttgaaattttaaaatataattttaaataactaaaaatataaaatttaaatttccttcaaaaaaataagaaattgaaattctcttattctctaaaaattctaactgcatcactttttgcttcatttcaatcttaaaagaatactccggccttcgacctccaacctcctgttactctcacagcactcatctcacctgtgcatgagattcaaaattttaaaaattaagaaatttaattttttttatctaaatacaaaattttgaaaatgaaaaaatttaattttttaataaaatataaaattttgaaaataaaagaattttaattaatatattttaatttttctgaattttaaatttattaaaattttaaaatattccatccaaaagcaaaatgattttagttatatttataatagaaacatattcgtgttagatctaaattgcagttaaaaaaagttagatctaaattatttccttattagtaattagcacggagagttataggcttatagcagatagtagctgtgtcagtcctccacgggatatgatcaagcagttagcaggagatgctagtctcttgaggctgtagttgactagttaatgtatttacagaataagaaaggtaaagaattatattctaattggattatgaattattatatatcataaatttatgaattttttataatattataaaactataatagttatatagtttatgagtttaaattgaattcaaatttgtgttaaaaatgttaagtttaaatttgagtccatcttaattaagttggacaaaatgtaaacaatttttgcacaaaagatatatacttctttgtgtcaaaataagtgtatttgaaaaaaaatcaaaacaaatgatgcatgtcactttttaatataattttatttatttacaaatatatattaatgagtgtttataaaaaaacaaatactattttgtgtcagaataatcattgtgttggaaaaaattattattttaattaatcttatgaaataaaatattatatttttttattttcaacaggtagattcgtcaatggactgacaaaacatattgtcattcctaattataagcaataaaaataaaaaaataattaatgtcatattggaaagttaaaataataattttttcatcttaattataagagatatattaataaaaaatgagttaatgatcataacgttaattttgttatattattatttttttcatctatttattaaattttttatttgtgtaaaacaatataatgagatgaagtattaaataaatgcttataaaaatcattaataggcgctatataaataatagtcaataaatcaatgaatattcattatattaaaataaaatatataatttttattgaagcattaattactattattaataaatgaatgaatatatttattatttattgtagtaaaaataaaaatatttaatactacatcgaaaaaagaacaccattaaatgaaattgattgttatttgttaacactttatcgtgtagcgagtgaagtgcgggcgcggcggggactgactaacgtctaacgtcgaaaccgtggtttcccactataaatttggcacctccttagtccttagtccttactcatttccatacttcctctcattttctcacccttttcttttttttctttcttcctctttctcttctctgttcataacaacgactattgttatttgtatatggaaggagcagtacctgaggctgatgtctctgccttcagagaatgcctctccctctcatggaagaatccctatgtccttcgcctcgctttctctgcaggaatcggtggccttctttttggctatgacaccggtaaatcaaatcaaaccattcaattcttttttttatctatcggattaattaggtttagcagaaggaattattttctcgccatccgacaaccactgatgtttaaatctcaaagagaataggtgtcaatattttaatattcaactgtgtctcaaacaaaattgacttttgtcaccaaaagacaatacttttgagaaaacgccatttttttttcatttctatgttttgctcttatttgtgtgtgtatttggcgattgattggtgggtgtgtatttttgcaggggtgatatctggagctcttttgtatataagggatgatttcaccgctgtagagaggaagacctggcttcaggtaaattaatgcatgcttatcactcctaataactcccaagagtagaaaaaatgaaacctttgtccttcatacaattaaattattaattattttcccactcctttctttaatgaaattttatctcctcgtacattgttttcagttacaacttcacaggttgcacgcaaaaataaacgcatggttttgtgcattcatactactttgtagacgatcatcttgagcaaaatttgcatgcttttagtggataagactttgtgaaatatctccgaattaagagaagaaaaaaggaaggcattaagaggtcctcctgcctttcattcatatagctaacttttaaacccgattatataaatttatttatttttactatctcgatcatatagctatcttttcaacaaaagtatttatcttatcttaatttcttatgaattattgtaaagatttgaggtatttacaccattactcttttacgaaaaagtttaattttttatttaccctttttctgatgccagtcatgaattttgtttgatcgtctattaaattggcgaatattggattagtttctcttcttcatttttgttcggtcgtcacgataaatgcgttattgaaacttttagttggtaattaattatgtcatgtgaccctctcacttttttattttattttgagattctgttttatttaataattatttggacttaatatatctcaagatccggtttgatctgtttcaatttaaatattttcatttttatttgtttttacgtttttacacatgtctttttgtttgtttgttattctcttctttttcggatttgaaaacagcccacaaaaattgacaaatgttttttttcttccaaaccatgacatattctcaaactgcatcatcatcaatcaattcataaaaaagcaaaggcagcaacttagcatataaaatagatgggacccagtgatcactgaaagtaaacaagaaacattaatgttaaaaccaaaaggtgttgataaattatttcttaaattgaaaatattacttttatctaaaaatagacggacttggtgagaagaatattgcacctcctggttataaaaagtaaattaatgttaaaaatttgcaattttattttggaaagaataattgtccaattaatgatttagatctcatgttttttcatataaagaaattatttattgttatatttgagaagaaggtttttntcaaataaatcttaaaattattagggacaacgttttaccttattttacaaaaagatagtttcttaaaaaaataaaacttttattttcagtacactacagtgtgatgaattaaattttattccttaaactatacggtaagtgcacgcgtcactaaaatcttaaaattatgaaaaggttaaacaaaagaagaaaatacgagagaaataagagagaaggaaaaaattctctttaataggaaaaaagcctcaccactttttcttttctcactttaggagaaacagggttgagaagaataatgttttacgtttttcttagaattcctttgcctgcattttcaattcattattattaaaaaggcataatttttttactcaagagaatctctcttttttccgcagatttttttcaccactttcttttacgaagattattttttatttcaaacgaaacaaattatataaggatttggttcttctaaaatgtgctataatgctaaattaactggtaatattttgataaacgatacgtcagataaactcctaaggtggttaaaattagattttagtcaatggttcctataattaattatcatggatataatacagaacatttttccctccatgttctgagtttaaagcacaagttcctcaaattatcatgtgttaacgaactacttgtagaaatttgtgaaaccgtgcagggttttctttcaatgttgatttgaaatataagcatttatgttcatattgtgcaagtcaaattgttatggcttgattttgacacaacttgtgttcaaatgaaagatcttttatttaataaaatgtgtactgtgttgtgcctttaaaaaatttcaggaagctatagtgagtacagcaattgcaggagcaatagtaggtgctgcagtgggtggatggatgaacgatcgatttggaagaagaacatcaatccttgtagctgatatcctctttttaattgggtcagttataatggctgctgcacctggccctgctgtcctcctcctgggtcgagtatttgttggccttggtgttggaatggcttcaatggcatctcctttgtatatttctgaggcttcccctaccaaagttcggggagcccttgtagctctcaacagtttcctcatcaccggtggacaatttctctcctacctcatcaacttggctttcactaaggtcagcacaatcttctcttttactttgtgtccataaaagatactatattgcaaatggaattggcatggcttattaagtatgtgctcaggttcgtatgtactgatggatctaagatctgaggtcaatcagagtaaactattttaaaaaataaatctaatatataaaaatgaaaaatgatttaaacacataaaaataagagatcttaaatatgaaattttaaaataaataaatataattttattaaaaatagagaacaacagtgaaaaaacaaaatagtaaagagaaataaagaaagtgtttgagagagagaaaaatggacctcattacatctgtaattgatacttggtaaaacaaattggtggctggatagttttaataatatattgataaggggtgtatttgtttattctcaataataataagaagtttaataataagaagttaggagatccaaatacacaaaattaagaatataaaatataaaattttaagaaaaaaacatgaatttattaaaatgagggatgcatttatccacactctaacaagcataggtccgccactgtatatctggctatcggctaggataccttaggcaaaaaaaattggaatttgcattacaaatttgcaatccatgcttgtgtgttgttgaatttcattataaaaggcattgttttcttgtgagatggtcatagaaatttgttaatttttatttattcaggcgccgggtacatggaggtggatgcttggagtggctgcggcacctgctatagtacaaatggtgttaatgttcacgctcccagaatcgccacgttggctgttccgaaaggtaattcatgatacatcttacatttgttgttatctttgtaagaattagacctttatgtgtttataaaatctgtctttctattatgtaacagggaaaggaggaggaagcaaaagcaatattaaggaaaatttatccacccagtgatgttgacgaagaaatccaagctttgcatgattcagttgctatggaactgaagcaggcagaatcctcagaaaaaatcagcataatcaaactgttgaaaactaaggcagtgaggagaggtttggtggcaggaatgggccttcaaatcttccagcaattcacgggcatcaacactgtcatgtactacagtcccacaattgttcagttagctggtgttgcatccaaccagacggcaatgctcctctccctgatcacttctgggcttaacgcgttcggttcgatcttgagcatatacttcattgacaaaactgggagaaagaaacttgctttgtttagtttgtgtggctgtgttgtagccttgacccttttaacattcactttccgccaaaccgaaactcattctccaatgattagcgcagttgagaccgctcatttcaacaacacctgccctggtttcagccacgctgtgaatgctaatgaatgggattgcatgaagtgtctaaaggcagaatgtggtttttgtgcatccggcgtctctagcaaggtaagtcaaatacaatgtttcgataataaaggaatttaggtcagttgattgagtgtgtgagttgttgtattcctgatacttatctttgattattagagataaataaaaaaatgaatttctccatgcacagtagtaattattgaattcattgatatgcttgttcttacattagtgtccattacatgtgcatgcagcgcttacctggggcatgtttgatttctaatgacgctacaaagggtatgtgtcagaaagaacatagagcatggtacacacaaggttgtcctagcaaaactgggtggcttgcaatagtgggacttgcactgtacatcatattcttctcaccagggatgggaactgttccatgggttgtcaattctgaaatctatcctctgaggtaccgtggagtatgtggaggaattgcttctacaacatgttgggtttcaaacctcattgtttcgcagtccttcttgactttaactgtggctattgggacagcatggacattcatgttatttgggtttgttgctctcattggcatcttattcgttctcatcttcgtgccagaaactaagggagttccaattgaagaagttgagcaaatgctggaggaaagaagtgtgcacttgaagttttgggagaagagaagtcctccccagaagggttgattaactttgaattagatctttgtctaaagaataatatttcacaccacttgactcttatccgtgatatgagataattatggtttcttctaaggttaagtagtgaagaggaatatgtttaaatgttttctagcttttgtttgtagttttttttttctctcttgagatttgctgtttttattgtagttagtgtttggctagtatgttttatgaaatcctaaaggatgaacaatgaataatatataatgatgatatattatatataacgagtgttcagtcatcatcatcattatgtgttttatttcataatgcaaaactaaccgtagcgttcaatttaggtattaacaaattgacattttccagatatcagtgaaagttctaaattttgacattttgagaattaataaataaaatagaaaaagtttaatgagtgactcttctctccatgcccttaaaatatgaacaagtgagtaaataaaatggaatttttctaaattttttaaaacaagaagatgttgagaaatcgggttggctatgtaacactaacacccaacctaattaactaatctagcttcaacactaacactaatatgtacacactttaaaataaatttccccgattactattttatgaattgccgaatggtatacagatatactactatatgtttgtccaaaacaattttcacaaccgtaatgaaaataaatttcccccattatagcttcacaaaacattccatattagagtggagcaattcttacttggtcacaatgtgtttgtcttctcttcttcttcttctcctaaattcactctgattcgctgcccttgctttcactttccaaggacttcttacacgtgttggtggagtccattttccacatatggctctgtgcattgaagcagtaacaactataaacgaccccgctttgatcagattgaacaaaacgagacaaaagcatcaagtatggagggatgagtccctgaagctgatggctctgctttcaaagagtttctttctctttcaaagaacaacccttatgtcttcgccttgctttttctgctggaatgggaggccttctctttggctatgacactagtaatactacaaagtatatcatcatatcataatggtttatgtctctttgctaattatttttactttctaacttattgagacgatacccatttcactactcatgtgtccgttttggaagaaaaataacaatcctttatgcagatgcactcttctttgctggttctatcatcatggctgttgctcctaactcggccgttctcgtctttggtcgagttttcgtaggccttggtgttggaatggcatcaatgatatcccccctttacatttcagaggcttctccaactagagttcgaggagcccttgtaagtctcaatagtttcctcatcactgggggacaattcctttcctaccttgtcaacttgggcttcaccagggtaagaacctatgctatacttgttcaacagcttttctttctactattttgatgtacattcacataaaaaatgccttaggacaatgtttaaactttatactatatacttcacatgttttgtacattagacagatgctaaccaatattcttagaaaaatgattaaagaattgaaaatagaaatatttttattggaatgtgtaaaattgtgttgttcattatcttttttgtactttcttatgattttttcattttttttcttttaattccttaaccaatatcttaataatcaggtgaaaggaattttttagcaagaccatttacattatctaatttattaatctaatccaggattttattcgtgagataattgatgatatgctaacagaatttgtggtaccattttcttttttcaggggaaaggaacatggaggtggatattaggaatagcagcaatacctgctgcactacaacttatgctatttcttccagaatcaccccgttggctattccgaaaggtcagtgatttaaacaaaccctaaatacagtataaaaagtactatgcaactgctattagtactattatccaatcaaaattggtaattcatttcagtaattgctgtcaattttagccaccaaaataaaagcaatttgaagtgtggattttgattggagagcaaaaaaccaacagaacgcatgattatatatatatatatatatatatatatatatatatatatatatatatatatatatannnnnnnnnnnnnnnnnnnnnnnnnnnnnnnnnnnnnnnnnnnnnnnnnnnnnnnnnnnnnnnnnnnnnnnnnnnnnnnnnnnnnnnnnnnnnnnnnnnnnnnnnnnnnnnnnnnnnnnnnnnnnnnnnnnnnnnnnnnnnnnnnnnnnnnnnnnnnnnnnnnnnnnnnnnnnnnnnnnnnnnnnnnnnnnnnnnnnnnnnnnnnnnnnnnnnnnnnnnnnnnnnnnnnnnnnnnnnnnnnnnnnnnnnnnnnnnnnnnnnnnnnnnnnnnnnnnnnnnnnnnnnnnnnnnnnnnnnnnnnnnnnnnnnnnnnnnnnnnnnnnnnnnnnnnnnnnnnnnnnnnnnnnnnnnnnnnnnnnnnnnnnnnnnnnnnnnnnnnnnnnnnnnnnnnnnnnnnnnnnnnnnnnnnaacgcatgattatatatatatatatatatatatatatatatatatatatatatatatatatagattagttttgtcatagtggtcatccaccataatcatttctaagatacacactattagtggtatttcttttctttttaattatttcaacgtgtaaaagggaaagtaagaagaaggtatacaagttgaggaagatttacccagaaggggaagttgaggctgagattcaaaatttgagggaatcaactgaaatggaaattaaggaagtagaagctggtggaggttgggtgagccttgtaaaaatgcttaaaatcacaagtgtgaggagaggtttatattctgggatgggcatagtcattttccaacagtttgtgggtatcatcacagtcatgtactacagccccactatagttcagttagcgattttgcctctaatcaggtagcaacgcttctgtcactcatccattgttcttcttactgtcgttttccaccagaccaagatttcctccccattgattgacccaactgaaacaactcacttcaatggcacttgctctggttgcactgcagctaactaccgtgatcaatgggattgcaagacttccttaaaggttctaaaaaatgtggcttctatgctgcctgggataaggtgaataaaagaatgttaatcattattaaacatttcaataatcctgtaacattattaatcacttctgaaacatatttataagcattagtgccgcaagtacatatttataatccatggaaatcgaagagacagtgaggagtttacagcaactcacgcacgcacctttctcaaccaactaatctagatctctttgacatttattttctcttagtccagaataaaaaaaattactcttaatcacttgtgaggtaaaattgaccaatagtaaacatttcaattacttcacaacactgttagtatcagtatacaaccacatttatttgactgtgaagtaaaattaaccacatttaccgagaggtggagaattcacagctatacaaatttcattacttgataaaaaaaaatggtttttcatatcattttttaaatattagaaaatgttaatgatattgattcatgttggttcttactctggtatcaactgttccacagctaaaacctggtgcatgttgggactacgacaacaactaggagaatcattgtacttcacaacacagggattagtattccgaaggatgtcctagcaaaactggatttgttgcaatagttgaaataataggcctagcactctacatcttgttcttctcacctggaatgggaactgttccatatgttatcaactatgagatataccctttgaggtttagaggagtatgtggaggaatggcatccacagcagtttgggtgtctaaccttattgtttcccagtccttcttatccgtaactgaagctatttagactgcatacacattcatggttttttgaataattagtttagtagccatcatctttgtccttgttttcgtgccagaaaccaagggagttccaatggaggatatagagagggttctggaaaaaagatctctccacttgaagttttggcagaaatctacctcgtgatcaactcttttggtcctgaattagctggttttttccatatatattagtccttttctttattactaattttcatcttcgtttgcgtctcttatttttgcatcacatgaatgttacatcattttgtaatataatccattaatttatgcagatataaatataaatggggtgtacgtgaactaatagaatatgaaatattcatttctcttttcgcataggagcattgtttgaacttcaacaatgacagtgttcatgagataacaattagtttatattattttttattttatttataagaaataatttagagtgtaaaaataatgtatttttttataatttaatttaattttataaatagaatcaagataataatatattttacatgtagaagtttatttatttgtaatacattctttgtttaaggaaaaaagttatataggactggtgtagataaaaacggtttcattattgttttggtacttttcttattttttcaaaattaaaaggagataatattttagtactcaagattaggggtgaaaatctgatatgtcatgttagatcaggtttggttagatttgactttgacctgatttaaaaacataaaatttgacttggactaattacttgttataggttttttttttttaagtttagcctggttttttattttattttctaaattattttatattaataaaataatataaaaatgtcactaataaaagaaaaaattataaaagaagttaaatcatgttaggctaagataacgtattgtatgcttggcttggaagtcaagcatgctaggttttactacaagttcaatcgaaaactctaagcatgttaggttttactacaagttcaatcgaaaacaattgtccctagcttagcatgtttggaaccaaagcatgtgaagttttgctactaagattaaaacttgattaggaatcaagggtgtttttgtatgaagtattgttacaatcatgtcctttcatatctcggtaaatttgtagttttcttttcttaatcttccggttcaacaaggagaaaaggacattgattgatctggagttcaattaggagataaataaagtctgtataaaatttgtttctgggtactacacaaatgattcgatcttaacttcaacgcattaattatttgtacccaatcacttggttaaactagtgaatttgaagtaatgaaacacatgccatatagatgtaattgttggaccttagtcctatataggattgagtatactggcgagccagacacatttaaggctgctgacaaattgaacaaactctatgcgaattaaatggacttaaatttttggtttgcgttcatctcttgtagccaatagttaaataggatgacccacatgccttagctaaaattgtgagaactcatatcatagatagttgaaatatagtgattgagagtaacattacattgatgcagatcaagagctagtaataatcataatgtaattaaaattaaaaaggacatttttaacgataaaattcacatttcaatgttattttaagaaatctgcacttaaggtgaatctaataaagtttcttaatctcattctgagagtgatattcttaagctccttgtcaatctatgaaacttactacttgttttcaatatttgcttcctcaaatacatggtgaacaattagataaaaatataatctacaaatcaaagactactaaacttaagatgaatttaaaaattacttgaaaagaagtgaatgttctttttactaaaaaagacatgtggcaatctcagaaaataaagttttatcaaaattcaaattaaaactaaaatatgttttattttttgaattttaaaaatgtggttcaattaaactaaaaggtaaaattatctgaagaaatttttaaaattgaaagttttttcattatttatagatttaaatatttttttttatctcttgtaatatatcacttttttttatatatttcagtccttataaaatttatttatttcttttaatttgttccttggttttttgtttctttccttaaaatatgttattttttatttctatttttataatatattaataatttgttttagtctttataatttttaaaaaaattcaaaatagacaaaatattattaggatgaccaaaataaaataaataaattttacaaaaatcattttttttaaaacttcacataaaaagtactagtaaattataagaactgaaaatatattttagatatatttatattataataaaaaaattagaataaacaaaaaagtgtgagaaaaaaaagtttagtctaatgtcagtttgaggtttatttctgatctcttaaaccctattgtcttaattggctgctacatacatcactccctccgctctctctcccaatcccatggctctgctttccaattccaagcttctccgatggagactctctctccatccaaaccctatgtccgccttctccaccgtcgaagctctctccgaccacgaccagcctcctcacccctccccgcagccccaacccccacccattgttccccctcgcgagcacaatctcgaactcaccatctgcaagatgatgtccaaccgtgcgtggaccacgcgcctccaaaactggatccgctccctcgtccctgagttcgacccttccctcgtctacaacgtcctccacggcgccgcctcgccggagcacgcgctccagttctatcgctgggtcgagcgcgccggcctcttcacccacaccccggaaaccaccctcaagatcgtccaaatcctcggccgatactccaagctcaaccacgcgcgctgtatcctcttcgacgacacgcgcggcggcgtctcacgcgctgccgtcaccgaggacgcctttgtctccctcatcgacagctatggccgcgccgggatcgtccaggagtccgtcaaactttttaagaaaatgaaggagctcggcgtggaccgcaccgtgaaatcctacgacgcgctcttcaaggtcattctccgccgcggacgctacatgatggcgaagaggtactacaatgccatgcttcgcgagggcgtggagcccacgcgccatacttttaatattctgctttggggtatgtttttgtcgttgagaatagacaccgctgttaggttttacgaggatatgaagagtaggggtattttgcctgatgttgtgacttataacactttgattaatgggtattttcggtttaagaaagtggatgaggctgagaagttgtttgtggagatgaaggggagggatattgttcctaatgtgattagtttcaccaccatgttgaaggggtatgttgcggcagggcggattgatgatgctttgaaggttttcgaggagatgaagggctgtggggttaagccgaatgtggtgactttctccacactgttgccgcggctgtgtgacgcggagaagatggcggaggcaagggatgtgttgggggagatggtggagaggtacattgcgccaaaggataatgctgtgtttatgaagttgatgagttgtcagtgtaaggctggggacttggatgcggctgcagatgtgctgaaggcgatggtcaggttgagcattccgacggaggctgggcattatggtgtgttaattgagagtttttgcaaggcaaatgtgtatgacaaggcggagaagttgttggacaagttgattgagaaggagattgtgttgcgtccgcataatgactccgagatggagcctagtgcttataatttgatgattgggtatttgtgtgagcatgggcggactggtaaggcggaaacttttttccgccagttgttgaaaaagggggtgcaggattcggttgcttttaataatttgattcgcgggcattcaaaggaaggcaaccctgattctgcctttgagattataaagatcatggggaggagaggggttgctagagatgcggattcctacaggttgcttattgagagttacttgagaaaaggggagccagctgatgctaaaacagctttggatggcatgcttgagagtgggcatttaccggaatcgtcgctttataggtcggttatggagagtttgtttgatgatggcagggtccaaactgctagcagagtaatgaagagtatggtggagaagggggtgaaggagaatatggacttggtttcgaagatattggaggcccttctcatgaggggtcatgtggaagaagctctgggacgaattgatttgcttatgcttaatgggtgtgagcctgattttgaccatcttttatctgttctttgtgagaaagaaaagacaattgctgctctcaaactgttagattttgctcttgaaagagactgtattgtagatttttcaatctatgataaggttttagatgctctcttagcagcagggaagacactcaatgcttattccattttatgtaaaattctggagaaaggaggatcaacagattggagcagccgtgatgagctgatcaagagccttaatcaggaggggaacacaaaacaagcggatgttttgtcaagaatgatcaagggaacagatggaggtcttgtaaagaaaggaggaaagagaaaagctaatgtatccacatagtttgttctctcttcattttcttttttgtgttttagaggtgagagaggtattattcctttttcttttggttgtaataagttaccatatgaggaagtgaattcatgaattgttctttatttcaaatccaaatttgcaactcctgtgttctgagtcttctgactgactccaacattcttttttttttnnnnnnnnnnnnnnnnnnnnnnnnnnnnnnnnncttttctttataatgttaccagtatactcctatcatggtctccatttatgtttaattatatttagctcaattctttcaaataatgtaactgtgagaagttggaactgaactgtagttttcaatcaaacttttctcgattttacaggattttgaatctttggatttctcttttatgttgctttccaaatcctgttttgccatgttgaatcaacatgatgttgaatccatcttgttctaagaactgccgtcatcaacatatcctgctgtgctgacaatacaaccaccagccacctcgcgggattcattttttagtccttttttctacagctactggacttctgttttgcaggttctataaactcagaagttgttctactcacaagctaagaaaatctgggtgcagagataattgcatcttccataatttttgagaaattaggtaatatttgtgaactaagcaggatgacatcagacttccatttgatttctaatttcttcccttctcagttgttctgatgttttttctgcaataattcctcatatgactttaatttattttctgattactgttgttccaatttctatatgatggtatacctagaatgtcttacttccagatttggttggtttggactgattcaccttgcgtaggttgtctgaatcacacatgtttagtgtttacttgtaggtatgtctgatcccacaagtttcacgatgccttctgatcctgtgtgggactatcggggaaactcggtagaaatgctggaattggtaccacaggttgggctcctgcaacgctcactggttgaactgtgcaaccaaacaagtattttacgtaatttgtgcttattgtcttccattaatttcaatcctctcagtttgtctatctctgttctttgttgtctctcacacaggtggtccaaacctctctgttctttgttgttctcagttgaaacttacatcgatcccttacttaaaaccacatgccaaaccaaagtcactaaactggaagggaacttccatcgcggatcaaaaagaaggaaacttacatcaatcctgttctgaaaaccacatgtggaacaatttagttaaccaaactagaagcttccaatggtttactgcaaaatagtcccgtaacttcgggagaaggggtgcctcctcacaaaggggatcgcagtgactaggcccgggcaattgtttaccaaaaacacatgtctccgcaaagtcgtaagatcatgtatgggggctgttgtctgcccagtgcaatggcttaccaattgtcatcatggaagaataattttgcagctaagagccaactaatagcatgtcagcatacaataatttccggtaattgcattctcagtagatgtctaaaatccaaagcaagggattcaattcatcttatgctattcgtattgagaggttgcagaatatttgacggttgtgaagataataatggcatgttaaatatcctttgcggatgcttttactgtgccagttcactcattgacttggggttagagtaccttttactagcaatttttcatctccgtcaacagaatcagttagatctcatgggcctctggacaaatattcaatcggatcagtgtcataataaataatgtagacgaagtggctaaaggagttgcataattgctggtcttggctttctttagaattagatatatctgtgaacttatctaatttctcattttagttgtacaaccacgtaggactcttgtttctgcggaatgcggatatgttcgttttttcacaaagttacaatatttcttttttcttttttcctttttcacaatcgacaattagacaattgaacttatgacacagagcaagctttataatgaacatggaaactcctaatgtcccctctaaagacaagtttgcaatgttgactacccgtgtcctgtaagcaaggtatattaaaatatttgggattagtgttttatttgcaaagaatgctccgttttatcgcagttagtgctaatgatacaagttcagtattagatcacatgagatgagtcaaggatgcattagagaacgtgataaacatcacgtttcaaatccaaaatccaatttctttaaaaaaaatccaaaaatttaatttttttaaaaaattaaaaaaaaaaaagagaataaaacctgtcgagtcagatcggtccaaccaggatccagtaacctacccggtcgagtttgttcgggtcatcccgagtcaattgcatgaccgatccaacagtggaaccaacccagttaagccaccaagtctctgtccgactgatccaactgatcgggtcaaaacaagttcaataacactgggtctaacacatttaagtgtgtttggactagaatgcaagagcaagatagtaagatcataaatgaagtgagattaacctacattagttgattctcgatggtatactaacttaaccatgtgtttgaacatgtcattttgaggatcaattcatttattaatgaaattaaaatactatgtggttaaattatgcatttaggtaaagaatttaaacgaagatggaatttgcaacattttaataagcaactttatttaattaacaaaatgagagaattaaaattctactaaaagtaaagaattttaattattttttagtgactcattcctttctttctattaaagctcgatttgtctcgtctcactctcactttctagaaactttgaaactctcactctcgctcttccacgatggcaaacacattttttctttcttgattcagagcaatcactctcttaacgcttcatacaaggttggtcttttatcttcattattgagggtttcattttatattttgttaatttgtgttatgttttttatttggttgtttaatttcattgattttgtttttgatttgatagggttttattggcttctttctcattatgcttttttgttgttgaatttcaatttctttagctactcactcatttctctctacacattcacgagtcacccttgtcttttcattttttacccttctcaactcaatttcttcttgtatagaaaaatctttaagcactttcctaaattggttcacattcagaaacaattggtcgacttcaagctttatgcttccatccttctccttcccatacggtttccttaaaactcctctctcaaacataaatatcactcatatcatcgtcagaatgcggattcccaatcacatcttgggtttactcaaaatcgctaacacaatcactttgattttcattactccaatctccatactcaccaatgggatcatactcactcttagaagactgattatcactttcatccatttcgtaacttttgtcatcatcacttgcatacatgtcatcctcatggaattatccattaacattcacaggttcatcacaaatgcattcacaagttcatccacatgttcattcacaaattcatttacattttcactcacaggttcattcacatattcattcacattttctatcacaggtaggtttcaaaactcatcatttgttctactaacatacatatgaatataaattgaatttgattcttgacaaacattttcagcacatcatgatcagtcttaagaattttaccactaccagtagaacaaaatcacaaaataaaagggtgacatggtgtcaagtctaagtcattaacaatgttgttcacatagtcatgtgcgtcaaatgttccaaacttatcataatcaacattgcatatttcacttggttcgtcccgttggtcagtaaagtggaccaaaatatccatgatacctgattcaagacctatgtattccagttcatctattgtgttcttgtggtcccaaacatcaacactattttaatcaacaataataaacaaatgattttcagttcatccattgtgtttcctgtggtctcaaacatcaaaactattttaatcaacaataataaacaaataattttaaaaattataagtggtcctaaaccgatcccccattgaaaccccattcaaaaagagacaacaataatcaatcaaaattaaataaataatcttaaaaagtaacatatatacaaggtccagtggtcacttacaagcagaaccatagcgtgaacaaaaatcttggaataggaagagaaacagagacactcgtgaacgtcgaagaggaagacaaactaaggcactcatgaacgtcgcgaactagaagaggaacagtggagaacttacaaactggaagaggaacaatgaataactcctcactaacgataaagaggaataaaatgtgaacatcatgagaggaacaagaaaactcactaacaagaggaagaggaacagtacgtgaatcttaatttatgaaactaattgggagtggataatttgggttttacaattaaagtgtaagggtaatttcgtctactcacatatttcgttgactttagttaattgcattaacatatggggtaaacgtaatatgcaaaaaatgaagggtatcaggtgaaatttgagcaaaacatagggagtgcgagtgtactttactctaaagcattttaatggttaaatactattaaaaataaaaattatattatatgtagagtttactcataaataatagaaaagttgatcctttttcttgactattgatactcttgtaagctagaaacagaattgttaggaaattaaattttttaacgttattatgtgttacatattgtattaataattatattatgctatttaatatatattagataaattaaagtgattaattaaatatgcccaaatagatttccaagtaaatatgagataaataggtggataccaatgatagactaattagatttaacgggagcagtttattgacccaacaataaagaaaaacactatatagtattatggtattcaatatgtcaaattaaatttttgttaaatatagagaataacatctaaggagtgatttgacagactaaaactcataaataaaggctaaaaggctacaaaaacaaaaggataaattcatgctacaataaaacatacatgtatgttttatttatttaaatttttttgatgatccaatatgatacttctaaattttattagataatgattttcaccgtatccatttagaattaattttctcatagtaacaatcgtgattgggtttcacagttgtagagagaaggaaaaagatggtgcttctacaggatttaataactgaaatcctgttaaggttgccggtgaagtctatagttcgttttaaaagcgtgtgcaaagcatggctttgtctcatatctaatccctactttgcaaagtcacattttgaactagttgcagcacgtgtgtctagacttttgttcattgcatcttctgctcctgaactccggtccatagacttcaatgcatcgcttcatgatgactctgcctctgtggtcccaaccctattatcactttgatgaaatcataggttcctgcagaggatttatgcttttgcaccgtttatcccatctctgtgtatggaatccaaccacaagtgtccacaaaattgtacctttctcacctgtttctttcaacaaggatgtcgtgtttttcacacttcttggtggttttggatatgacccatcaacagatgattacttggtagttcatgcatgctacaacccaatatatcaagcaaaccgcgcagagattttctcactcagagctaatgagtggaaagaaatcgagggaatccattttccttatattcatttttattataccaacaaaaaccctggcagtttatataaccaatttgggtcattcttgaatggtgctattcattggttggcttttcgcagtgatgcatcaatgaatgttattgttgcccttgatttggtagaaagaagtttttcagagatgcgtctcccaattgaaattgattatgacaaccttaatttttgtcatttgagggtacttggagaatcgccccatctatgcgctgttgtggggtgcaaccattcagtagaaatatgggtgatgaaagaatacaaagtgcagtcatcttggactaagtattgttattgatgactttgctattcggttcttctttccactatggtatacaaaaagtgatgatattgttggaacaaatgtcagagctggattgatgaatgcaatgacaaaggacaactgcaagaacatcgaatctactgcgatagtctatatcgatccgaggtggctgtgtatacggagtctattttcactcccttgtgacagtaagtgagcaagttgaagaagaagatgattggcaccagcgaacaagaagaattagattgtaaaatattttctgacacctttattatacttttggtactcatcgtatattattatttgtttgatttcttttggtatttttttagcttgaaaaagtattaggcagaatgatgaaattgctatttcatcgttttgttttttgttttatgattattccaacatgatgttattactgttttactgtttgcaatttatatccttccattcttccacatgtttttttttcttagccataacagtgaatttattgcattgctagcatgatatgtagccaaattttaaattggggcaatcagttgatagttgtcgatactattgatatgaactgaatacgacttcaacattaatagtgatgtctaagttagcctaagctacatgacatgttgtgaagtcaatattatcaatcttggtttccatgccaaattaaagatgtttattttaatattcgtgtcttgaatcatgcataaattacattacttttatgaagaatattttatcaatatcagcttgaatatataaagtagccaaatagtgcaccctagaggcaggaattactttaccaattttagcatgttgaaatgctacactaaatacttactaataaagttaaagtaattatatttgtaatggctaatttattaaagaatacgaattttctagtctgaatgtggttctttaggcttagggaaggcatactatgttggttctaaaaatataaatcttagattaatgcctgtgataccaatagggaggttatgcataacgggttggtgttttttttcaatttaaagcttaccaatttatgaactcagttttctctcatttggatttaatgcattggttactacagggggatcttggcagagctatttctcactttgctttaagatttagtggatgtgattagtgcatctatggttatttagattcagcttattatatgatttctgtattcggttgcaggggcaacacacatctgtggttattatcaattaagtttaggggctggagtgatttgtggggagtctagcatttttttcaaattcaaaacacatatggtgtggttgcatggaattcaccctgtcacaaacatgctaaagtcggtttgggcatgtgcagctacatccaaattttgatcgatcagaataagcccaataaagcttttcatatattatttcttggttgtggaagtggtgaggttttgaagattggaacttgtgtatcttttagaatatagtgtatttagagtttgtttgaatgtaaggttaaaagtgtttttgaaagtttttttaatgaaaaaaattctatatgtttaataaaaaagatcttaaaagcatttgtgacttgtatccacacaagtccttatattacattgacttggaagtcaaatcattttttgttaggtgggttgatcatatcaatacctttagtttaggtttaggtggcctcttaactcttaaggctgatttgcacgcatatttttagctttgcgaaactttgggtttttgtattatatgcataacttcttacattaaaacacgtttaaattgatgcatgacagccacagcataattatagcttttttttccttagaagatactatgggaaccctaaacaaagaaaatgtaatttaagaactagtttaaacattctcacttccttgcaaacattggagtttgccaatcccaggatttttgccctttcaatgtcccctcttaggccctggatgcccttttgcttgtggataatttatagtagattttgttgtttatgttttccctagcattaaaaaaatctaaacactgacaattcatacaacggatgatataagttagaatataatttcacataaatatatagataagtctctatttcccaagctcatatacggtcttaagagaatgttatagtgtattcttagcattcttctttgaaaaatgtctgacactgtaaattcattccctacgattcatacaacggattatataagttggaatgtaatttcacataagcatatggataagtctgtatttctcaatctcatatatgatcttaagagaatgttatagtgtattcttagcactcctttgaaaaatgttcgacacagtaaattcattccctacaatttatacaacggatgatataaagttggaatgtaatttcatataagcatatgactaagtctgtattttccaagctcaaatacagtcttaagagaatgttatagtgtattcttagcactcttttttgaaaaatatccgacactaaaatttattccctacaattcatacaacaaatgatataagccggaatgtaatttcacataagcatatggataaatctatattttccaagctcagacacaatcttgaaagtatgttatagtgtattcttcgcactcttctttaaaaaatatccagcattcctataattttgtgtttaacctaccaatatgaaaattgttttctaacacatttgattaacaggaagtgtgttcacaaaagtataattacgtcaatcagaaggttactatttttgtgataccctctccattgttgtcttatgatttttcaattttacattcaaattttcagttacatccttgagttttcgaaatatatcttcaaattcccaacttctttaggttacaattattgagaagagaatgccgaaaaagagaaggagagggggagaagtccttaataaagttacattgtttgtaatgttttgatttttaaaaagaaaaattataccaatcgatatttactcaactacacgtgccacagccctacaagtacatattaaaagagacatacttcttcttttaggcccaacacacaaattatgtattagtcaggctgggcccacatctatccactatgaccacaaattagaagtacactttggttatggtctactggggggtaatatttcttaatccaactttttcccttcttttcttttgtgcactacattagaaacataaattcatgatgaacatatgcttacaattgtttcacatctcacaagggtattttattatataaaaaaaaactaagtgttcattttccaattttaccactgtgtcaggataagtcctcacaaatataatttataattttcaaaaaatatattttttattttctgaatgtaaagtgtttgaatgtatagtagagagagaaattattgtatgattccacagtccagaccattacatatttatgattctaataagtattcatgtaacaagatgtaatcaacaaatttcatgtaacatgtggagatggttatgattatagatacattgggtattcgaatatacaataattttttctttataggatctgaccgaatttttttcattttacaattagatactcactactcagtgggatctgaccaaaaaaaaaaaaaaaaannnnnnnnnnnnnnnnnnnnnnnnnnnnnnnnnnnnnnnnnnnnnnnnnnnnnnnnnnnnnnnnnnnnnnnnnnnnnnnnnnnnnnnnnnnnnnnnnnnnnnnnnnnnnnnnnnnnnnnnnnnnnnnnnnnnnnnnnnnnnnnnnnnnnnnnnnnnnnnnnnnnnnnnnnnnnnnnnnnnnnnnnnnnnnnnnnnnnnnnnnnnnnnnnnnnnnnnnnnnnnnnnnnnnnnnnnnnnnnnnnnnnnnnnnnnnnnnnnnnnnnnnnnnnnnnnnnnnnnnnnnnnnnnnnnnnnnnnnnnnnnnnnnnnnnnnnnnnnnnnnnnnnnnnnnnnnnnnnnnnnnnnnnnnnnnnnnnnnnnnnnnnnnnnnnnnnnnnnnnnnnnnnnnnnnnnnnnnnnnnnnnnnnaaaaaaaaaaaaaaaaacaatatagaaagcataacgtgaagctatcgaaacgtctctttattcagtctgcacctatggtttaggtcaattgcgggtgaatttcctttagcagttataatttggaccctagaaaatgcctctaagctacctaatacctattcccccatgccaagcgttgaatactaataagtaataacagtttgtgcatgtattttcctccataatttgaaaatgacctatcaatcgtgaaattaatttgtatgatatttttcctcattaggtctatccagacacttcttttcttatagtaaaattaatgttcttaattaaatttattaaatatatactaaatctcactcaaactttttaacttttcttaaagtaagttttaaactaaatttttataaaattattttttttagacatgtaatacaccattgttcttttgatttgattttttccatttcgcatgtgtaatattttttatttttaaattttcagcaactttcatattataatatttcacgcggtgacattttacttaatatctttattagtcagaattctccatcaattacaactcttcataggtaatcatttctaagatctcaaaaatcagttctatatgctttcaggatcaatgattgaccccacaaactaacataagatttttcggtgtattttgttctcattctcgcacttttcaggaaactttccaagagattatccatcctataactacttcaagtcaaacacgcttaattatgaagttcttaagagatgaactaccaaaaagtagatgcatcttgttggtataggtattaccaattaattcttttaggtcatcctcaattgtatagtttcataattacacaacatctggatctctcattctggtgtgattcgatcgaagtgttacatgtctatcagtttttgcttggtttgtcctcgaaccacatcgtactgggagaaagatttgctctgatatcatttataacatttctaatttttttacttctcgataactctcatattatgacatttcatgcagtgacactttactcaatatttttgttagtcagaatcttccacatgtcaaaatcttccacctccgtagttagttcattctaaaacctaaaaatttaggaatcttacatgatacaacaaacatatagaatttctattttattaatgattaattattaataaaattaaatgaatatttcatattaatgtcttggtcataataaaaaaaaaatagagtttcttggtggaggagacgttccaaaagtcaagtggcatttaacctgcataagacctacttgcctgctaaagttgccatctatcatctatctaacttcttttgccttccaagtttggcaaaaatctaaggttgcttatagcttcttcattctcaagtcaactatcatactcaatttggaattttctctgtgcaatttaatttgtggacacacacacaaaaaagggtaagctagcaacttgtccctaacttatgactttcttctttgcataatattgtagactattgtgattagaaaatgacagttttattgattgtttgatttagagttcactttttaattctttcccgccaccccctattgtaaactcttgttgattggagagttgtcttgccagctcactttaaaaatgataagcaataaaccatccatgaataagaactagtactcaagtcaatctttcattctcatacctttttttattgtattgtttatttaaattattttgcaaatttcctaaccctgggcccacctgtgttttattgtatgcaaacttttgaggtaattaagcatttattattaagtaatgtagaacattgtttcgcttctgataagattagcgtatcataaatcagaataattaacatgttcaagacaactgttatcatacttacataataaaatataaaaaaaataaatgacatcaaaatataaaccaaacagtttatcatagtgcattccactaaggtggacatgaattagatttttaaaaattcaatttatatctatttaaatggattagattttaaatttatatttatatttttttaaaaaacaatttagatgcaagatccaatccatttaaatggatataaatttagttatatccaatctatatctacttaaatgttatagttttttttttaattttaattattaaatgttaaaaagtgaaaacttagtacatgcttatttaaaagttattttcaaccgaccttggttaagactatttttgatcgatcgatcttggttagtatattttttgcctaccttaactaggacaatttcgacatatatcggtctagatatttttaaaccgacatcaaccataactattttttgactgacattagttaatgcattttttggcatattgactaaggatttttcgatcaacaccgatcgtgactaattttttgtcgacattggttaggattttttagctaacatcgataagatttttttttttgctaatgctagtcgttgatatttttttgccaacattcttcgagactattttttggttgacattagctaggttattttgccgacgctggtttaaactatatttttgttggccaacattaaccatgactatttcttttggttgacgttagctagggatattttttgttgacatcaactaggttttttcgatcggcgtcaattgggggaatattttggccgatgtcaactaagtttttttggctgatgtcgatcgatgatgtttttcaaccaatgtcggccaaaaaatagtctcatctaatgtcgacaaaaaaaatcctagccaacgtcaagcgaaaacctacctgacatcgataaaaaataatctcgatagacatcgacaaaaagacgtagctgacgtcgacaaaaaaatagtctcgactaatgtcggccaaaaaataatctcaatcaatgttaacaaaaaaaccttaccaacattaaccgaaaaatagactcaaccgatgacggcttaaaatcatcattagttgacgtcaaccaaaagaactctagacaacatcgacaaaaaaatggctcttaacaaagttggtcaaaaaaatctagtcgtcattatcaaaaaaattgtattgaatttttataaattcaaacaaatatccaatccatatccattctatatccaattaattagattagatttaaaattcaaaaaactggatttggatatgaaactaatctatttaaatgaatttaaagtgaattaaattggatcagatataaattattttatgaatatttatttttttcacaactctacattccacccttaaataaatggttttttttaattattaagaagttacaatcttaacaattagattgcttgtatacctttcaatcagtttcttttgcaatatttagcgtaatgaatattcagtaactaagatttaatatttaaagagtccaatgtaatatcacttgacaaggataacttattagacttaataattgccgctgtcaatttttttaaagtgacttgtgaatattattataaacttctgttaatgttgggtggcacgtaatggccttaaaatagattaattctttccgccctctaaacttataatacaatttgtatttacatcaatcctttttatatacatatttattttagttttctatagttatactacataagtacttcgattcaagacacacacagtcattcaaacactaaggtggatgtatctttactatgctgcttataagtatttcatatnnnnnnnnnnnnnnnnnnnnnnnnnnnnnnnnnnnnnnnnnnnnnnntatatatatatatatatatagagagagagagagagagagagagagaaattcatttattttaaaattaactaagtattaaatacttcttctgcttaacaatttattcataaatctaactattaaattatatgatacgatattaatggttatataatatatatatatatagatatgaaattttattgttgatatttaactaggtttatctttgaaagtatattaattctgtaaaaaatatatatattaattgataaaatatcaaatagttttttttctttctaaaattaatttattgaatgataattcaatggttgaaatgaaacttaacgtgcttgaatttaaattctctcttttcaatcatgcaggcatggccctttaattccacctaatgagactgatgaggattcctcctacactctagctataggttacaatatatatatatatatatattagacattaatgtttgaagattctacgcgagcatggcaaggcgaggatatgtaattaaataaccaaactcatgtgatttgtcttgtacacggctaaataaataaaggtttggagagaaaaaaaatcaagggttaattaaaacagcttttattaagacatgatgtgtgatacccgtaaagggaagcatattgtgccagaatcagagccattattagaaggaatacatgtattaatcatatcagttgattctgttggaatcacttgagcaaatgctatattctgttggccatcatatatatatatatatatatataacaaaacccatcaaagattttaagagttgtggaggaatctacctgtgtgattttgaacctaaattagtagtttctataaagattaaaagatataacaagttaaacagatggagataataattctagtcttttccagaacaacactttcttttatgacacggaatatttgggcagtcgatcagttgagattaatttaggtggttatagaatgaaataaaatagtacaccaacaatttcaaacatatttgatagatagttaaatttttttagcatgttgtcaataatttaatttgtgataatgtaattaaatgtaaaatattttattagaaaaaataaaacctattttagtaatttttatgtctcaaaagtaannnnnnnnnnnnnnnnnnnnnnnnnnnnnnnnnnnnnnnnnnnnnnnnnnnnnnnnnnnnnnnnnnnnnnnnnnnnnnnnnnnnnnnntattctttacggcctaatagttcatagatatttttagtgaaaaaaagagagtctccattgctattaaagttgcaaatcaattttgaatgttgtaaacaaacaaccccaaaaaatgtaatttagtgactttttatttatttattattatttttaagcgtgaatacgacctatttttctgttcaaataggtttatataaagttaaaaaaaaaatcagaataaatatattttgacgaaacatgatatctgcaaaatgacaattagtcattattgaattattgaggataactgctgcatgaatgannnnnnnnnnnnnnnnnnnnnnnnnnnnnnnnnnnnnnnnnnnnnnnnnnnnnnnnnnnnnnnnnnnnnnnnnnaataattagtttcttcttattcataaaaactcaaacttatatacactaaactttggttaaaatcttaaagcagtttctaaattgaaactgtgtaaaaaataaaaatattatttataaatattaaagtctaaggagaataaatcaagagaaaatagattaagcattaaacgtataaaataatattataatatcgtcaaattacattttatgattaatttattgaattttataataattattttaaaaattatatcatcaatcatttatgattaaataatagtgaaaaattttgtcgttaaactcataaatcaataggagatatttatgtaaaggaatatagtttgatcctaacaatttactttccttattcatatttcccacgcctccaccagacaatatcaatgtccaaacaataaatcaatttctaattctgcctgggtcatatatgccaaccaagaccatccatgaggattcaacatggtactccaataatcatataactttatggttccacaatcatattgatcacatggagactttcagactttgaaaaacttcaattcgatccatcaaaatcaaattagcttgaagttgaaagtgctgtttaagataacttgttatacatcaacctcctttttatttgtatgatatgttcaaagaaaaatatagaacaaaataaattataatatttagttttttataatttttaatccataattttgatctcataattttttctctcataatctaattttcaattattttgtgttttttttcttttattttgatttaaatgaactctagatttaacatatccatctaagttattataaaaaaataatttaattgattagaatatgaaaaagtgtatataaaattgtaaattttttagaataaaaggacaagaaaaaagaataagggaaccaaaaattactattaaaaattaaaggagaccaaaattataatttagtctaatatattaatttatgggatattgtataatttaactaataaataattttatatatttttaataagtaatcttgtataatttataaatttatatagtttaaataaaatatttaataaataatattctatcattttaacttttaatattttcatacaatagacataatattcacttgaaaaatcaaaagtgtaattaataaacacaataatattatatattaaatatacgttttannnnnnnnnnnnnnnnnnnnnnnnnnnnnnnnnnnnnnnnnnnnnnnnnnnnnnnnnnnnnnnnnnnnnnnnnnnnnnnnnnnnnnnnnnnnnnnnnnnnnnnnnnnnnnnnnnnnnnnnnnnnnnnnnnnnnnnnnnnnnnnnnnnnnnnnnnnnnnnnnnnnnnnnnnnnnnnnnnnnnnnnnnnnnnnnnnnnnnnnnnnnnnnnnnnnnnnnnnnnnnnnnnnnnnnnnnnnnnnnnnnnnnnnnnnnnnnnnnnnnnnnnnnnnnnnnnnnnnnnnnnnnnnnnnnnnnnnnnnnnnnnnnnnnnnnnnnnnnnnnnnnnnnnnnnnnnnnnnnnnnnnnnnnnnnnnnnnncagtataaccaacttattcaattttaaggactagtgattcactcaataattaattatggcaattgcctaagaggaaacagttttcctttgtgtgattgtgtttgaattttcattaagataaatctgaacataattaattattgcaatagcctaaaaggaaaccaacaaatacataaattaattggtctaagattgttctaatttaactactaatttaatgtttgagtcttggatttgtaattatattaatattaactataattattttttatcatcacctttcatttatatgaaatttaataattaaaattggtgatgcattataattaaattttttaaaaaaataatgataaaaacgtgaaattatttaaaaaaacattactcttacaataactttaatccctcctccaaaatcaatgttactaattttagctttttacatttgtttacatcaaaaacataatttgttggctattgaacgcgtttttaaacacgttcctagccaatagctttagtggtgcttaaaaaataaaagtataaaaagtaagatgtgataaatataaattataaagttaaaaacaacagcaatttagtcacatattttttagtaaattagatatcatagatgttattcaattcattaaatcagagaaactaaactcatttatgggtgttactcacttaaaaaattgaatacaaaattttcacagtaaataaatcatcttttaacatgtgaactaagcaaatcttaaatcctatgtcaagtcgagcagcaatatagtaacatatgaaaagttatacatgtaattatctaaaatactccgtgacatgaaaggtgcacgaagaccgtgacacgtgcaatgctggtttaaggtcataactggtatcacactcactccctgatcgagaaacgagccacagcagagcacagtcacagagccagaaagcaaagcactctctctctatggatctctaacattgacacgtgcccatgcctccttatcactgtaccttctctctcgagcgtgtcacccaacaatttcacctctcactctcttcataatcacatagaataactcaatacgaacacaacactttttcacttattttgcaccctaccctcctttattattattattacaagccagatactaactgtaagacattgactaaaatttaaaaaaaaatattgagatggataaaattatatttttataatttttataataaatatttttcttttagtctttaattaatcataaaaatactaattaataagattattattattattatttcttgcatagcccattggtggtactacaattcaaggtgcagatccttgtgttcatttttggcttataataataaaaggctaatgtgacttgttaagctttaattttatatttttaaagtgagtttatgggttggattagtaatttaataatggaaagtgggttttatggggttgtactaaaataatgttggcttctttttacccggcaagtgattgagcatggaattgcgagaacagggcaacacgccctcttggttgtgtgtattattattgctgctgagtgcaaccccatttgatttggttgtacttttgaggccaattcagtggtaaacatggccatgatttgtataagaatttaagaatcatagtatgacaacacccaacccaacgtgttcccctttttctctttttactattatcaacctcaattctttccagatttggatctcctgcggttaagattaacggtagacaatcccaaccgtttaaatcttattactctatattttaatcataagacactccactccatattttttttcaagaatgaaaataaaatttaattacacattttacccttttcttttatattttgtaaattttaccacttattttttatatatactttgttatcatacctaatattaaacattttgtcccaacgttagttaaccattggttatcgttagttgattgttgacttcacaatgttaattattgatgtaatattatgtccgctaacttggttaatagggttgacatggtcgtttgacacaaacatggtagtgcataagagaatgactttataatggatatttttttttcgtttctaattataagattttttcagaaatttgtttactgttttttataatattttaaaaaaaatttaaatgtattaattattttttccttttgcacccttacttaattattttatcttcaaacattaataaaaaataattaaatagatagagatataagaaaaaattaattttaaaatgatattataaataattaacatatttaatatatttgattaaattaactatttttcttaaataatatgaattaattgaaagtattttataattagagacaaagaaaatacaacctaatactttagataaaaagagattttaaggtgatgatgataacaaatataataacagtaataatgatgataaaagaaaaaagagagaataattattctattttgttgctttttaacttaactatgttctcaacataagaaacatattacaccaacaatataaggaagaacaaccctaacccaacaatattccctttcaaacaactagatacttacaactatcactaaatgacaaacaattgatcctaagggcaaagcctcccaaatgcaatgaggagcaacctaaaagaggatagcaaccaatattttctgacacgtatactttctgcctcgtgactcttatattggagtatccactcattttagtgttaagagtactttttacaaatacatatttaccttcttacttactatagttttggaaatttggagactagaatcaacttacatcaaaggaataagaggaatcatctatatgttaaaataatttagatcataaaaaacattaactaattttttgtacaaatttaatttatacatatgtacaccgatgtcaccgagtataagaatcatttggtgtttaactattatcacttctcataccatgggagaaaaaactaatcgtcaaggcgtcaactagagtgataatattttaacattcatttattttaaatattctatcaaaaactcttatttcattttttctttcacattatataatctattatacttatatttttctttttctttttcactctctagatttcaaatagcatttaggagtaaaaaaaatatttttttcccgccaactatttgtcttttggttaaaaggtaaaaaagaaaactgtcatgcaaaatatttcctaggtatggtgcgtggccatttttattaatagattactctatgaaagtgttttcgccttgctgcttatatttgacagttaatttgactacaatactaattagcgcaaaaaatctgtgttattgatatgctggaaggattttaaagagtaaaaacttttgtcaaaattaatcattgaatgcgtaaattaacttatacatgattattttaatttaaattttaaatatacaattacattaaatattttaaataataatcctaccagagctttgcaataattatattgattcttatacatgctgttggttaaaaaagagtaaaaaagttgtcaaaatctaagttagtattagttaacttatctccaataatataataatcacaaaagatgttccatttgtactacaaattgatcatggagtgtgaccgaatggttggtctctccccaattgccattctggttgccagcaaagggatcttagtgggtttttgctgcatccatgacccatcaaatgctgttcctgcagctgcatataccttccacatgacacttgaaagagagagggtaggaagctaagacgcacatcattggtcgtacggacagctacaacctttgcccattaattaaatcataaataccctcaatttttgctttataaaatttaaattaaaacatgatgtacatttaaaaccccaaacaacttttcgaaaaataaagttgtctttaattggaggagccagttagttctgaactcgacatttgggtggtggtgaagaaattttttacactactttcagggtagtgctatccttttcatcttcattcgaattaaccctcttttctaattacaattactactctgccatgcattcacaatcggatttaatttcgattagtatatttaatttgttcttgaggataaattttgtaaccttaatcttatcttgtttctttagtttgtttatattatattttcctttcttcaattatttaaacaaatatataaatgttgtataaaggtttactagaactacgaagaaaaactaacatagatttaatgaatcatttgattcttatgattgtagaatctttaaattttaatccatacacttagaaatcaatatatattttagtcctcacacgtaattttatatcattttaatctttgtataaactcttttcaatccatttaaattcgtacaattttagacaacaaagattaaatcagattaaatactgtacctaaaggaacaaaacaagtagtttttgggatagggattaaaatataaaaattatataaatataaggactaaatgaataagtaaaccgtcaatataaatgcatggattttataggcaaattagttaacaaattaaattaaacataaaatattttgtccaaattattccaagataattattatctatatatatgacgcatgaaattagaattataatttaaaagtctaattttagctttacattccaattttaatttaattcggagtataaaaaataaacactagctgttaaaagttaattttcttcaattacatatttgtttgtaaatacttttttgtattgttatttacgcataataaataatgtcttgcacaaattttaattgctaattagttttttttttcttatttatcatcagtgactttacttatatgacttacaccttatgtttgaatacaatttcatcttccaaataattttttgatggtaaagaaagaacggatagttacaaagttttttttcttttcttttattcgtgctccctctctgtctgatatcttcatatatttattttttgcatttttggtacagaaagggggatgggggacacatatcactgatggacctgctacagctttcaagttttatctagcaaaaaccacagctcatctacgaacttttatccataaaaacagtaaacgttgaatgaaagtagacggcaaataaatttttaacttaagaagttgtaatttcatttacatagaacaatatatattaagttaagaaattacattattaatatataactattttaaaattatatttttaaaataatattaaactttggatcgagttgagatgagtcaaagtactcaaaagatattgaatctaattctaaatccaaattagtcaaagttaacttcaaattgatatgggttagtatagaacacgataagccatgaacactcttattagcaagcatgagtttgttcaataaataaatattatacatcataaaatacttatttaatgtatgtatgagtttgtcaaagttaagacgcattgttacgatgaaagctaattcgaattgtgtaatttgtaatgagtgcgtagaatcttccaacacctcttttttgaatgtaaatttgctaattagatttggacaacatgctacttgtggtatggtgacatacgggtattgccaccttgttgcattgctcacttttttggcaacatcaagggacaattgttgggaggaaagaaaagtcaatatggtgggaaatttggttaattacataggaatgaagtaagattcaatgtcaaaccaattgatccagggacactctttgatactattagctataaagcttgaacatggtgtaaagcgtacgttaaagactttgataccactttgtacgcttggaacactcatcctcgagaagaattgatgcaactggagtaaagcgagacgctacatatggctcatactgtttctctctaaaccatttgggtcatcttgtaatggtataaaatacttctcagcctcttggcttttgtgcatgtactgttcagtggcaatggcacttcttgtgacatttgctactttcttaattaataatataatgcctttcatgtgtaaaaaaattacttaatttaaaataactcttataataagcaaagatattggagatcaccttaataatttttatttttatcccaaataaatgcaggagagtcataatatcattccaagtacaatttaaattaacactttggcatgatctattaacgaagaatcaccacccaaattaaaataagaaactattttttcgaggttgatcaatcttatgatccaactccaccatctcattgacaaatagagagacacaagaagaaaaaaagttccaaccaaacaatgaattttaaaagaaagatttgtggatggattaccattttaagacatttaatttctaaacaaaatacttgttgctttgagaggtatcctcattgtgggtgagtgtttatatatatatatatatatatatatatatatatacactgaagaaacatatgttaatatatcttttcaattaaagtttgtaaggtatgtatatatttaattaaactatgatataaattattataaattaatctatttatttgaaacattaaaaatatttaaaattaatgttattatatacttttattatttattacagtacaagaaaattgttaaaattaatttattaaaaaatattgataatttaaaccaaacatacacagcatacaatctcttgaccgttattttaccttgttagttttaattttttggaactacttgcagggtcccatactctttaattcttgtaagaaaccagcttcttaattaatgagctagttaatagtcagtccatttacaaatcaataaatcgaccttgctgcaagaactgaagatatttttatctaaataaacatatcatctaattaaaacaccctatacaatagtacgaaacttcagtgtcgtgcaatttcttcaagggctagtagtacctgcaataaaactgttgtgatgtggggctaagaaattaaaactttaagctgtttcacaattcaattacactttgactgcttagggctcgctagtggcacatcctgttctcgacaacctatttgatgaaggaaagtgataggataattatatatcactttagaaaataattaaccattgtgttatatatttactccaaagtccaaactcaagtccgttgcttcgttaggttttactgcatttgaggtattattatttactttaaaaattgtatgaatctcatggttgtctttgaaaactgtttcattcggagaatagggaagagagtattgataaattactattggtactgatttttaaataatgtgagattttttttaagtaatatctgaacggattccaaaatcacaactttatcaaaatgagtcttctctgacttttcttttgaaaattcaagacacatatatcaatatatcattcacacgcatagttatttcaatatacgatccgtcttttctgttgaggtgctaggttattacagaattttcatgcatattatggtcccctgtagtcttaatttggtccctaattcatgcaagctttgtatttgcggctttccgcgcatgagattttttttgaaagatggcacactaccattaaccaaatataacaattagttcgtctcattggttactacatgcggataaatgaggttatgtcacaacaattaatatccattttaccttataacgtgaatcttcgtgaaacacctgtttatacagagtggtaaaaaattcatataggctctaaactcctttgcatgtaacccttgtttcaaaatatcctgtcatttgagtgtatacttcttgagaaaatataattgtattttaattttataagcaatttataataaaaaagagagaaaaaaaaatacaagtgaatgatgtaacgggaaaaattgaagagaataataaagtgaatctaattaaactacactaacaacggaaattttttatagtatatgtcatctaatcacttattatcatatataataaatttattcacttttataataatattatatttaacgttatacttaggataattttaataagttgttactataattttttttatactaactatccataaaattaaacttatataatattgtaaaaagtgttataaatatatattatataaataagataattcttaagttaattttcataagtgtttgtgtactaattgtcctgcactatttcacccatctcatcaaaatgggatcactgctttttaaaatttgtaagttcttcaggcttccttttagtaaaggaaaaatttatggacatattggcatcttcttttgttctcactgaattctgctataattgttaaaaccagcctatttaatcttaacctaccaatccataaggatgtttttgatcatcaaagtccagtttttnttctttctttcttagtagacattcttggttcatttaaatagaaatttatacaatatatcaaatcacgaaggaaaaaaagaaattgaaatttgggaaacacgaaaaaaggccagtacccacttaaaaagaagtcaattgcgtgctgcaaaagcctgactttttttttcttctaaaaggtgggaattagaaataagaataatacatgttctataattaatttatttttacataagtttaatttgatttctagatttattttacagtttgagtttgattgtacaggtgatcatgaaaattaatttttgtttttttgataaattgattataattcacaatacactcaacattgacaaatcactttaaaagaaaaaagaaaaggcaaaaaagtttaggaaggaagatattctccctttctaaagtttaaaagggtaatcgcgtaagagactgcttatgaagatacattactcttattgaagaaaatcactcctgaaaataaccttatataaacacagttccatcaacatttaagtagatataatttgtttttggctacttctgacttataaaaagtgtgagagggcgagggaggtaatttcttttcttttaggatgaaaacatttataaagctcaattataacttatgctagttggcaaaaaaattaatatattgtttttaaaaaaaaattatgaatttggggtattgttagaagtatttatgcaagtgtggtagttagttgcgccaaaaaaaaaaaaacgtaactaaacacatttaccccaagcgcgacaggtgctcagtcgcgccctcattaggcgtgaccggtcgcgccccagataggtgcgactccctcccccgttgcgtcccacacaggcgtaactctgcactgcgccatgttgcacctgccccagacgcgactcttccgttttaaatttgaaatccaactaactttcaaaaaataacctaggtataactaactaattatatcgctaatttaataattatattatcataattttttaaaaatttgaaatacaactaattttcaaaaataaactaggtcactaactaataatattctaagtcaataatgtcctcaacagataactaactatatagctaatttaatacttattttatcataattttttaaaaatttgaaatacaaataattttaaaaaataacctaggtcactaactaataatattttaagtcaacaatgtcctcaatagaaaactaactatatcgctaatttaataatcatattatcatgatttattttaaatttgaaatacaattaactttcaaaaataacttaggtcactaactaataatatattctaagccaataatgtcctcaacagataattaactatatcactaatttaatgattattttatcataattttttaaaaatttgaaatacaactaattttaaaaaataacctaggtcactaattaataatattttaagtcaataatgttctcaatagaaaactaattatatagctaatttaataatcatattatcatgatttattttaaatttgaaataataatgtcctcaacagataactaactatatcgttaatttaataattatattatcataatttttttaaaaatttgaaatacaattaattttcaaaaataacctaggtcattaactaataatattctaagccaataatttcctcaacatataactaactatatcgctagaatttaaaaattatattatcataattttttaaaacgatatgcaaagtcgagcttgggggaggcacaacaggatgcagagtcgcgcttgtgtggggcgcaacaggggagggagtcgcacctacctaggtgactggtcacgcctactaggggcgcgactaagcacctgtcgcttatgggggaaacatgtttagttacgttttttggaggcacgactaactaccatacttacttaaatacttctaaaagtaccctaaattcgtaattttttttaagaaaaacaatatattaaattttttgtcaactataattttgtttttaaagaatccaatctgatatttattttccacaatatttgatcaaatataatatttatttaataaaatatacaactcattcacataccacgcttcaataattagatatgacaagaaagaaacgaacttatctttaaagtgaaatgaaagaaagtgtatatttattttcaatttaaattgtttataatttgagtttaatatttgtaagtataaaaaagttatgatagataaaattatcaaaatattattaaaaagattaacaaattcaccaatacataattatttgtgatagaatgataacgtaattattattttttatattatgagtatatatatatatatatatatatattttaatttgaatacagtaaaattaaaaattaggaaacaaataattttttcttagataactaaaaatttaaatgaattaagtttggggtctcactaggacagagcaagccttaaaatttaaaacacttataaatgtatttataaacaagattcttatattataacaaaaattaaatacatgttttttgagaccccttgccaattcaattaatttgttggttagaaagcaaataattagtttttgtattcttagggtaataatgaacgggataaggttaggaagtaaatacaagaaaaaggagggacatatatgaacagcactgtgtctagtcttttccgataagcctggtcattgttcaaatggggaacaacatcaacaacaacaacccttcttcttcacaagcactttgagttcaactcaccgttgtgcttctctctctctgtctatatgtttagtgttttaccttttacacgcacacttgtctctctctagaaatcacgcaattctcatacacccggatttttctttccatttatcacccaccaaactaccaactttctctatctcttaccacaactcaaatgtttctttttgccatgagagaaatacaaacaaactgtaagtgtcaaccaaactccaaattcacctttaacaaaatgctagcatatgctctttggtagtgaatttcaggtcttgttttagccatgttaaggtcgagactataagagagtgatttaaaaacaaaaaacaacctgaactttttgttttcctcttttacatttgaaggtgctcttgagagttgagacatgagaaaagaccatttgagaaattcaacaaactcctgaaatcaggcagcaaaataaggtttcatctcatattttgtctttatttctctccccaccctcacttcgatctctttctttttggttaatactgttttttcttttttaaatttttttggtttacaaaatgaggggtacttactgaacaaaaagtattgtctttaacgagctaaaaattttaggttcggatttttgtgtttttttttcagtttgtttcaataataagggaactccagagacacagatctgtaagcttaacacctgggtttatttttgtctttgattgagatctcagcacctgtcacggaatctgacccaacattgtttaaactaataagactccaaattttatttttaatatgtttatttaattaagactattgagcatttcagaaatagtgtttttttttttttttaataatgaaccttgcagtgcctggagttgagagaatctgcacccttccaataatcaaaggacttatttagagccacacatcatccttgaaaattttccagtcaatttggcgccaaatgttggacctttctacatgactttgcaaccacgctgaagtaagccatatttgttgtctcatattttcatcctctggtacgtaccaacaactcctctatgccctttgagatttttcagaaaacattttctgcttatgttgttttagtgttggttttgcaattttacaagttgtgtctattgtgaattaattttatatgtatgcggtctttcataactagactaattgatgtataactaacgaagcaatagctttagttttacccatacacaaaagagaaaaatttgagttgagttacaaatgaacaattaccttagcaattagcattaacatttaagggctaatttataagtatctataaaaagtattattttttttttgaaaatcaagtatttattacgtcaaaattactaaaatagttgtgttatatatatatatatatataaattataacgactcatacaacatttttgtataacaatattttgggtgtttattttatgtatcctatcatttattacatattatatttttctcattttttacaaaatgtcaaatgaattgttgtaaaaataatattttcttataaaaatataacaaatacttctttataatgcttaacattttccagaaaccaaatatatgttttcctaagttggtaaagattcattattaatgacagtttgtactgagggacacatttcaattcaaccttttctcaaagtattgagttttttttcttcataaaagtatatcggtttttaatgtgccatataccaactatactaaacacagtcagatcttatctacttggggaatctgagaagtgtacgaaatatttgaattgaattgaatttattttaatttacttttgggtttgaatgataattaattaatagaaaaatcgtttggttgtttatggtagcagctgggtgtgattttgcaaggaagggtaagagagagggtgttgagacctagttcagtgttctgcaactgcaaaaagctaaacaaggccctcctgatttggaccgtgatatatcagagcataaaaaagcctttttatcactacacaaccaaagcagtctctgaattatcatcatcaacaatgcaaaggacatagtagccaaccccacactttcactcttttctctctttctctctctctttacaagtgtaacataacaaacataaagagaaagacaaaagtgtgtgttttgtgcaaggcatgattgtggtatggaggaggaggatgagattcaagcacagaaggtgagaagaagaggaggcagtgatggagagagcacgaacaggttccacagcagctggcaccaccaccaccaccactcttcgaggatcataagggtgtctcgtgcatctggtggcaaagacaggcacagcaaagtgatgacttcaaaagggttgagagatagaagggttaggctttccgtgaccactgccattcagttctatgaccttcaagatcgcttgggttatgaccaacctagtaaagctgtggaatggcttatcaaatctgcttctgatgccatttctgaacttccttctttgaacaatttccctgacacccccaaaagtgatgatcatgagaagagagcaaacactgatgttgctgctggggtagttgatggggagaattatgaaaatgagaatggcaataacaataaccagagccagaacatgtctttgtctaaatctggttgtagtagcacttctgagacaagcaaaggttctggcttgtccctctcaaggtctgatattcgggtgaaggctagagagagggcaagggagagaacaacaaaggaaaaggagaaagagaaaaatgagtctcatcatcatcacagcaatgttgttcctcctccacatcatcataaccccgtttcacaaacagcttctttcactgagcttctcactggtgggattcccaaagggtgtgatgatgaggagcctaataacgtgatgatgttcaacaaagcagcagctggtagacagcaatggtgttcatcatcatcatcagcagcagcacctatggactactttctgtggccttcttctagaacaacaacaacaccacacaatcagcatcaccatcatcatcaatattcttctggtgggttctcattggcacaaatccaactaggacattctcttcctgaggcaatgaatcacaatgtttcagcattcaacaataatgtgagtggtgagaaccaaaaccactcatcatcagatcttcatctgcaacagcaacaacacttctcatccataccggatcatcttatgtcagctgtggttacttcttcttcttctcatcatcaacctagcgggaacgactacaatctgaacttcaccatgtcctcgggccttgctggttacaatagggggacccttcagtccaattctccgtctcttttgcctcacttgcagaggttttcgccgttagacggatacactgtacctttcttcatcggagctgctccttctgctgcagttgctgctcctgccacggagaacaacaccaccaccaccaacaacaaccattaccaccatcagttctcatctgttttcgatggcagccgcttgcaactctactatggccattccgaccagaaggggaaagccaaaaactgatatttggattgctgcattttcctcctggtaaactatcttcatctttttattatgttttctcttttcaacccttttatttttgcagtaacaaccttatctaataattcatttaactcgcttgttagagttgttatgatacccagataaatctaagggttttgatatagcagctggttttttggccaataattattgaatgagattagagagagggagaaagaaagtagtgagtttttcaataagagaaccacaacccgtaaattttaaaaggatactataaaatttctctcatttagtaactaaactttatcaattcccattgagaactcataaaaaccactgtaaccccagtgcccggaggctccacgctatgcgcaggtaagggggagggatattgtacgcagccttacccttgcatatgcaaagaggctgtttccggattcgaacccatgaccaacaggtcaccaagacacaactttaccgctgtgccagggctcgccctctcccattgagaactcatatcaactaaaatatgatatgaccaatgcaatccttgaaagactcgtccttttagcagttggccgaaaacccaagttttaattaagaatgactcattgttatatataggtctaactcaataataaaaacatgtgttgaaaaattaagttagataatatgtaatatgcctgctattatttctcaaaaagtcctgaaatgtatatagtagctgtttcttttttgttttgtttccggaattgtttgtttggctttggtgtattgtaaatgtgtgatacattgcactccatcttggttgtttgatgtggtgccccttaatcttcttcttcaatgctttggctttggtaaaagagaaatacttgcacaaacacacatctaacacgtaagatttagacacaaccaatcacacaagtctaagtgtccagttaatggatatgacgtgacattaaatatttgatggtgtgcgtattgcttgtttggacgatgttgtttatggattgatgtgttgtgttgtgtgcaatactatgagccgctggggttctaggtaatgatgaacaagttggccattgggtataagtttacggtgttgtcttttttgtggataggaacatgggttgccgtgaatagggtatcggctagttgtctccttgtttgtgctctcattggttccctcctctatagcatgtcaggtgaaagcttttgtgtggcacaaaccatgtgtgtcactgatgagtggggacaatgttaattacgcttgggcccaaaattaatcagtctctaaaaatgactttataatcccaattactccaattaagctctcttgctgtgcacccacaagacacgatcctcattggctcattgcctaggttagagactagctaggattttcaatacacatggggtggacctttttcatgtgttgaaaggtccatgcacgtagtcagaaacttcactgctgacaccactcatgcttaggggagtattgaaagaggaattgtatttttatatgcatttttcccactgtattataacaaaaagtttgaatttatgagctgatggaaaaaaagtattgagcatagattcacacccaagaagaaattaataactcattttttttaagaataattttggatcttctcataacatctctttataattttcttcattggaagaaaatatgcttttgatatttgtaaaatattaaatatgagaagtgtttgcggcgctctcgatttaaatttattgaaaattaccctcaaatatccccaaatttggcaaaacttaaaataaaatacataagctcttgctgagattattattggatggtttataaaaaattctaatttcctttctctattcaaagttgaaaattataagtgatgattaaaactctttgctgagattattataaaaattaaagtactatgtagttaattttacttcctggaattttcaattaataattattactttcaatttttctctctaaagtacatgttttactttaaactaatgacccactatttaagcaaaagagaaactgcacatcgaccatggaatcttgtttgggagcttcaatttattgagaagagcatcgaagaaaagccatcctttcactttcaaatgttgaaaatactcagttttctggaaatgaaaatctttacatggacttactctttttgagttatataaactataataataatctaatggcacataatcattttggataaaaaataatattatgtcacgtatcacgtatatttgagtaattatttaatataaaatgattatgctttatttgttagcttagcctgcatatcttgcctagccttttgaacttgagtaggatatcttctcaagcatattagggctaacatttttagtaacatttttagtactttataataaaaaggtcctccgcataattattattttaggatctgaacattaattcttttaaacaggtgacatgggtattataattgatactatactatgagacggttttaatttaatggtcttaattggttggaagaactttatccttataataattatatgctgttcaaatcaagttagttggatgcctaatgtgatgcttaaatgacaaaaaaatcagatcatatgatttgttttgaaaacaatagtacatggaccacaaatagaacctgacaggagtaccaataagggtttgatatactaatgaacaaattagacgatttatttaagaaaaaaaaagttcaaataaatcaatgtcctgtttggataattttttcacaagtactaatagaaaaagctgtggtgataagttaattttaaattatggaagaagttcaattcactatttcttaatttcttcttttataagtatttataaagaaatttaaccaaaccttgaagagttaacaaatagaaggaagccttaattttctctttagaaagtttctcttgaaacttttctattaaatgcataaatcatttgatataagacttataatttaattaatgatcctaattgataggaagaaccttacccattataataattctaatcagctgaaacttagttggttgtccaatgtgatgtttaaatgttcggatctagacaaaaagccagatcatatagtacattgaccaataataaaacatgacgcgtgccaatatctaacaagagtttggtgtagtaatgaacaagtcatacgatctaaaataaagttcaagtaagtctatatgaaaatatatctcaaagagttaacaaatagtcaaaactagaaggaagccttcattttcttttcagaaaatttctctttgaaaattttctacttgtctcataattgggacatgttttactacataggagttaaaattgatggactttactatatatatatatattaaaacgtaactcttaaactatactaattattgccacatcctactagaaaatcatttagacatactaatgaaattaggaagatcgtcaaatttactctggaaatcttggccttttcttttcttgattgcttctatatattcccatcattcttgacagttgcactatcaacttgagtttctttttgtatgatttggttatcgtaatatccgttggttggatcatagtttgggctgagttatattgggcactgtttaccgcagtagaaaaggaaaacacgcatgttactacattgccatatataacaaacaaatatctaattcatcttaactaattaaaatagttaaattaattaattctaattaataatcttataaatttaaattttcgaaaacactcattgaattaaatgatttaagagatggttgtatttaataatactattcatttttctaagggataattttttcatcaataagtatgacttatttcattaatagtctttataataaataatggtatagaagaaaatgaataattaatgcattcaaaaatgatttatattttagaaaaaaatatatttttatttgttttttatatatccaggaacggaggtagcatgtgacatgacacttcctcttgcattaggattctttcatgttgagggaaaagtctagttaaaatattgaaaatagaaactagaaaacacttaattattctttgtacatgttttttgatgctatgtagcctattaccgttgtggcttttagaaagaaaaataactaagaggcgggatcactcaaatattgaattggaaaaattaatcattattcttacatttacacaaattttaaatacttttaaatctcttttggttcctttcgatatataaattttatcttttaatctttgatattttgtaacgaggctaaaagaaattcaaaagtacttttacatggactgaaaatgatgatttttacgtgtaagattacaagataaagtttgtacaacttaggggttatatataaaagtaatttttcctattaaattggtacataatggagttgtagattagtcaatagctttgctgttcaaatactgtcaggattcttcccacatataatccttctcaaacaacctcttttgactttttatgaggccctagtgagttccttttaagggctagcataaaattgtaggggcagttcctgaagaggctagtggtcatattgtaaaagttgagcaaaatctatggtgcaagttcaatggagctttatgaaactctatatggagtatggctgctatataaacctagctgaaaagtcattttgtaaatgaaaccaaactcaatataggcgnnnnnnnnnnnnnnnnnnnnnnnnnnnnnnnnnnnnnnnnnnnnnnnnnnnnnnnnnnnnnnnnnnnnnnnnnnnnnnnnnnnnnnaaaacatataatgtgaattttggaattgctcagtgttcatatttcttaacattacaagttgtaatacacgtgttactaaaataaattctcttttgttctttggtgtctttggtttgtaggacttgaaaatagagtactagcagcaagctgtgtcctaaagcttgcttttgccaaaagggatgagccggcgttgtcatcaagtgttggtatttcttgttaacgttggatcactcgaagtcattcaattacatttagtatttggatatatatatatgcgtgggaaatcattgtgtgtttttggagaaatgtaaaagctacttgattcaagatattcttttactttctgcaattattttgacattattgtctatactataaatagagaaaagtgttgtccatcaggacactaaatttctaaacaatgtctgatttttggcgtttattttatttagaagaatttttaaacaaaatatattaggtaatcagaaaacaaagaatatttttctttttcaaaaaggaggtgtcaaactccaccgaatagttcaacaaaaaaaaaaaaatcctccgaattgtgagtgtctcgcatgtgcaatggcaatgcaaactgtaagctttgtcataaactcttagctttccgcaaacaaagcttcaaatgtttcagacttaaaggcttacgtagccactgacgtaaaagtaacggcaaaaagtgtgatccaagcattgaaccggttcattgaataagttgagatactcggttaataagtcatctattgaattggagttttacttataaaattgatatatattaaaaatattaaaaaataaataacaatttaatcatttaatactctaaatttaaaataaatgttattataaaatacttaatatctcaaataataattaatatttatgtcaatacaagtacataaataagtaacaaacaaaaaaagtattcaaatatcttaaaaataatcatatgttcacaaaaaataacataaaaaagttcatattttttattttgaaaaaagtacctgattcaataaaaaatctacttcacttcaataaaaaatccatcctaattcaaccaaagacacacttgatccaacctgatcacatcaattatgatatattttttatcctcttaacaatacaaaccggtgtgcctattgggttccaacctatccgattattaaaacaatgataaggagcataggaaggagaaagaaatgaaggtagtttgagagggggaaaatcaaagaaaaagggagtgcaaatagcaacagcaaaaaaaaatgtgttatttataacaataatttacacaataacattgcttgtttcaatattttaaatcttatatattttttctcttttcgttttctcttaatagtaaaaattattgtaccaataaagattcctcttaaaagaaatgattttctaacttttttttatgaacaaaagaaaaatctttgcattttaaatatttaaatatgaattaaaaagtaatcaatctacaattgtggtttcaactttaactcaaattttgttaagtccaaaactcaaaaagatcttcctaacaattttggaagactaagaaaaagctaaaagaacttaaattatttactactaaaaataataatcagataatggctagtatggtcctttacaatttaatgacgttatttataattgggttatttaaaatttagatcgaattagaataaactatatatctcattgtccagaagcttctctcgctatgcaaaggtaagatggaagaatattgtacacagtcttatccttgcatatgcaaaaaagctatttccaaatacgagaacccacgatcaacaagtcatcaaagcacaactttagcactgtgccaggactctttaaaaattacgtatctcattgtctaaagactcattgctatgcaaaggtaatgaggaagaatattatacgcaaccttatccttatatatgtaaaaagactatttctagattcaaactcatgaccaacaagttatcaaagcataactttaaaataaaccaaaataaaatcaaactacaatttcaaactgaacccatattttttggctggctaaatggatcaacctatcaaactcaacccattttcacaactcaattagggagtttagttacatgtcacttatctattgtacccataagttgattatttcttctcattttagatatataggggtttgctcagctcatgcagttgaatttgtggggtattcttaaaagtcaggaaattgctgagatttagattctggaatattattgtggacagtgactgctgaatagctacacttagctcagttgtcttcctttttgaagaacaaaagcataagttctagagaataaataaaagacttaccataatgtaacaaataacaacacataatgatgcgaacagagtagatggcatggcgaatctagagaactttgttctagccctaacaaaatcatatatcttatctcaaattaatcactgaagttatacaaatgagtcctctaactcctatatatttatttatacagctacctatcacatatatcatggacttaaattatgatgatatatggaatattggaacatagtttccagcggttcatgtataaggaataccattcttcatgtgctattttttttaaaggaaaattaaaggtacatgcaatccatatgtctttatatggttaatacaagactctaccacaacgatcacatgcactagaggcaactggagcagcatcttttggctttgtcttctgcaactttggtagatcaatttccagaacatcagccagggccttggaaccttgttggatctcatccagactgcaaacattactttaggtcacatcctagaacaacataccagagaagagaaacttgcaatggacaaagacactagggagcctttgggatctagtactcccttcaatcttgaatataagcacacaaaaaaaaaacttacttatgcttattaaaaatgttagttagcatcatttaattgtatcattctcattttaaaaatatttttttccctaaaatagccttccttggaactttataaaaaatgaaagagaaacattggaaataacctcaattaaatgaacgatatttgaggaatgatctcattaaataagataaaattacttgaaatttgtttatatttgagaccaacacccaagacatttttttgcttctatttgagactagagggtgtatctaccattcccagtaatctatctttgcttccaaactccaaggatcataattaatctacataaacacaactagagtaatgaatatatgcttgtgttagtttaggtagtaaagaaagacatatcttataaaagaatgagcatatatttcagccttaaagtttccacattagtttatgactttatgatgatcaataggccaatttgatactgacacaacacacacatactctcacttgttttttaaaaggaataagttcataagttataaattgagataagtttgagtactcccaaaggtgtagcttgttaagatattcctcaaagttataaaaccttagctttcactagcttgaaatttgaaaatcttccaagttattctccttcaagccttctaggatctatcaatgatacaactttcaggtgtcaattgagaaaggtatatgaaggttaatttatcagaaagagaggaagaggtaggtcattgtaatacatagatttaaacagcattttttttcaacaaacaatgaatgatcaagaaaccaggaaacttgtaacattgatgattgaagaaaatcacaaaaacttggttctgcttgataaaaatttgaaaatattaagtactaatgattggctgcggtgagacaaagctatacttcaactgtttaacaaatttaaaatgtagtcccatattcccatgcctgaatcaacagaaaataactaataatgtgtacaacacagacactcctcaattcaaccattctattaatctgattttttctttacttgtcagcagattttttttttctatttatgttttatcgtgtatgtcttttggttatttattgatcatagtttggcttcagtaaaatctggactacacagtaatccagttttcatttccaataattattctaatatcaactaataatttccaagaggcagaactttaacataatgtaatgataacttgatataaagacattgcttcttgttttcgtaacttaccttatgcaaagtgggggagtaaagcggataattgtatcatgtgttggcttggcaaggactcctctatacttcaattttttgcatagctcatagcccgatacaggcaacaaattttttctgttaaactccactccaatgaacaatcctcttccccgtacctccttcatgtagtctgggtattgctgctgaatcttaagcagctgaccagcaagctcctctcccatttgggcagatctgttcaatagtaatacatcatttgcagattttatatattaatatctcagagaaaaattcacagtagaaaaaataaatgaaccaaattaataaagcatttactgaaacatggaaatttaaagtttgaaaggattcaagtcaacaaaagctagaaaaacactcaatgctagtaaaaagcaaaataaaaaaatttagaacataaattgatgaacataagctctgtaactcaagttctgaggggggggactgagtagaaagttaaagggcttagaaagaattattaattccctacatttaaactttgttagcaaataagtacctcaggatctccaaaacttgtattatttagtaacttcaaggaacatcaatcttttttgcacgccgacgcagttgttttgtaaacatggtcggaaacttgtaaatggggcaaaattagaaaatacaaataaatgatcaagccaagtctaaagagttgtggttactttttcgggaagggtgaggaataggatctgaaacaaaaataggtactgttggaagtgcaaatattcaagatatatgatgaatagaagtccttaacacaggacatcctaaaaaaatnaaaaaaaaaaaaaaaaaagatacacaacaggatttgatctaagttactgagatttatttgtaaaattctctgaaaagcacaagaagcatggagataagttctcaatcatcaataaacaaatttatcccaatataagaataacattatatttaatacattcaactcccagaacccaggccttagttttgaagcttttatttcacatgctgatgatgcttgatgaaatgaataaaatatacttgtcgagacttgtatttaactattcaagtctgtattataataagtatgtattggcaatataagatttggcaatgcatttgatacctctcaacgagtctttcattttttatcacttctagtgaggcaattgcaactgcactggccagtggatttccaccgaaggtactgtgaacaataacagagaagaagaaagcttcagcattattagtcttagctttcatactttaatatcattgaattgtattgtactaaatgaaattattagctaattacataaacaagaaatgaatgcaaaactaaaagcaaaatttcaagagtacacaaaggatggaatttttttataaaaaaaatagcaattgaaagttcttaaacgaagaactcattttaataagaaaactgagggctgttgaataggttcatcaacctgtagaccttccatcaaataggaaatgattataccatcctagaaagatcaaatattttctttaagtgcattgaaataaaaatagccaactatttaatgtgctggtgatgctacagttcctgtcctgaacgtaggtgtttacatccatgatgactttgcagtggaacataataagaatcctaccacaataataatcccaatattctaatactatttatctttattttcagatacttcctaccattagaacttataagcacagataagtacaatatgaatgaccaagccagtgtttgtaagaatcatcagctacaaactccaaagaatcacttacgggaatttacggtgcagtaaataatctcatctcagtcaattgtttctcctttggaaatataaatggttctgttcacagatagcttttgcaaatggagtagtctaattttgtcccatgatcctatcaacttgaacagaactaacatccctaacccaaaataaaataaaggcttaaatgcagttttggtccccctattttgctcaatccacaattttggttattccattttaaaatagagacatttggtccctatgttttaaaaatccgcaattttagtcccaatatttcaaaataaagacatttagtccttttattttagaaaattcacaattttgatcctcatatcttttttaaaaaaatagcaattttggtacaacttcaattttatctacattttttttcgtttatttcttacattataattaattaaatcattttatgatgataccttgaatgaatgttaggtctaggattcaattgtatcaaaataaaaaaataaaaacgtaggcaaaattgagaatttgacaaaaataaaaaaatttataaaataggaagtccaaatgtctttattttgaataggggactaaaattgcaattttttttaaaacagagggaccaaatatctctattttaaaacagagggaccaaaactgcatttaagcctaaaacaaactatatactataagattccaggttccaacagaagggagaattctgtctcttcacatgatctgacaaataaagggatttaaggatgaaaacagatgtccatcataatccagaagtttgacaactataggcaagaaaatgctaaacaaaaggagcagattaaaataaattataaatttataataaaatgaaaccttccatgctgtccaggttgtatacaaagcatcacatctttgtctgcaagaactgcactaactggtataactcctccacccagtgctttccctagtatctgagagaaaagacagttaaaacagttatgcatggtggtatcgaaaggagatagaaccttaaaaaaaggggtgtgtgtgtggggggggggggagtttgcacgttgcagcagaggcagtaaatttctcattttcttgaaagaaaacacaaagttgggtggccaagtctttcaagtggaaggtagtcgtatgcatctaaatccctgcatacttggcaagtgcaatggcaatttctatgattcaggcatgttcataaaatatatatttataggaatggagggagaaactatatcgattttgactaaaagtatatatccaaaagattttctgtcataaagcaattttttttattaaaagcattgagaaactaatccaaacatggtattatctgatttatcagtcaaacacaaaaaacataagcattccaaagaatgacatcatatgcttaaaagaagtatggtatctatggaatcaactacacatgcttttttcttgccaaatagtttcggtttcaactctaaaatattgtttggtatatcaacgagttttgcattgactgccgagggcctaacacaacctcctcctttactcggacttggaaccatatatgaaaccataggtggagttcctggatctaaattattgaagggcaacaatgatcacaacagttacctatagattttgttaaccctatgacgacaggtaatgtttatatgaatctagagatataaagtactcaagaagtaaaggtggtttctaaccacaacatctgggcgaacttcttcccactcacaagccagcatcttccctgttcttgctaacccagtttgaatttcatcagcaatcatcaagacgttatatttggagcaaatatctctaacagcttttaaataaccatctggaggaaatatcacctttaaacaaaaaatattatatattaaaagaatgtagagaagattatatactttgagaagaaaaaacataataaaaaatgtctacagaatgttatagccatcctgcaggatgagtgatatacaagggtaccataaagtttttcttttaaaaaaaaaaattcaaagaatttagaaaaagcaatacaaagtacatattgttcataacattttacaccatatagaataaaaccagttggcagattaataaaatgaagaaaaaaaacttaattgcactttttacccccaaagtttcataatgtcttgaattttgccctccagtttttttttccaggaattttgcccccacatagaataagcaccagaattgatgaaaaaattaccacaaattgtcttaattgtggcagtttaaaggaaaaaccggcccaaaatgtcttaattgtggcgatttttctacgtggggggtaaaattcacgatgttttgtaaattgaggcggcaaaattcgtgagaaaaaaaaattgaggggcaaaattcacgacatttgaaactttgggggcagaaaatgcaattaagccaaaaaaaatcattagattagattagaagaaaaagaaaaggcatttaaatatggattagcaaaaagaaagcaaaaacacccaaaacatataaaaaatgtcaagttcacttgacttttataagccaccaagaacaagtaactatgtttcatcgaggctatcatagttcatacataatattttacattcttattaggaaactaatacattgttgcacgaacgaaacaaaacatacaatgacaggaacgcagaatgtcaaaaacagctcacttcacaagtccaacgaatataaaaaaagtaaaaaaaaaactatgtaccccattgtccggaggctccacgctatgcgcaggtaagggggaggaatattgtacgtaaccttacccttacatatgcaaaaaggttgtttccggattcgaacccatgaccaacaagtcatcaagacacaactttaccgccgtgtcaggcatgttctatgtggtattgcaagcaatagaacgtctaaacattggtagattatcttaaaaacatgacttcattgaaaatagaatttgtggtgtgcttctaattcattatccatgtaaatgaaaatgtcaaaattgctgtagaaattttccattctagacatgcattatgtattttactaaaactaaaacatgcaacatggaaaaaattctaactgaaaacatacatcatcagtttttttgtgtaactactaacatcagtaaacagattagagaaagagaaagagagggctatatagcagcttccttatcatctcaattcaatcaacacaaggttggcaagcccataaatatgcacttccataaaacttaccccagcttcaccttggataggttctaaaataaatgcagctatgtgttctcctttttctgcagttcatagagaaaattcaaatagtgaactccaaagatctgtcatgataaagcaaaccactgaagtaaaaagtatatggcggcacagtgcagaacctttaaaaattctttcaagggcttctgcatcaccaaaatcaactttaagattgccaggcaataaaggaccaaaaccacgggtagcttcgttgtcacagctcaaagatatgacacctagtgtacgaccatggaagcagccacaacatgagacaataatagcctggaacaagtgtccatgagtaaaaagattcatagaaaaaatacctgaactgattctcataaaaattaaaaagaacaatccaaatagaatagcaacaaaggacagatgcttgtgctcaaataaagaaaaataactttcaggttgtaaaattgaatggtaaattactgacattatgaacagacaacaaaagtagaaaaatatataaataaatataaactgttaaacttcctacatcatataaaacagaaaagaggatgatataacaaattttctacattttctctttgtaatggaagaataccatatgtttaaccataaagaattatacatctcagatgcatcttgtttgcaaaatcttccataagcatatgtcacttgatgcctcagtcatacttaaaatttattccttcaagtgttgtcaaagttcacatcaacagatgcctaagtattccgcagataaaaaaataatagataattagatttgtcaagtattctggtttcagtttaatgtatccttaattgtattttccatattaatggtcaaagctttgtgaattggacccctctgtatctattttaagctacacaacattaaacatggactcaaatggtaaacatatttgaaaacgtctaaactgctatagtacacagaacatgtgaattataagtttttgaaaacaagttaacattataaaaaattgcgattaaatcactaccaatgcccatattaagcaaagatttagttggacccaacattttgcaaaattgtaacatatcatgatattacaactattagcatgcatcattctcatacttatacctcatctttgggaattcttttcttttcataaccccactttcgtgctaatttcagtgctgtttccacaccttcagcaccagtattcataggaagtaccatatcataaccaaacatgtttgtcacatactcagcaaagactggaaagcgatcattgtagaaggctcgagagctcacagtcagcctttctgcttgttcttgtaaagctttgagaattttaggatggcagtgtccctacagcaaaatgaaaagcacttagattattagaagttcgatgccatttgttttcctaaaaatcaaggaataataaaaggaaaagtagtagcaacagtagaagggatctggccacattaataacctcacaccacaaaggaaacaaaaaaaaaaaaaaaatgtatataagcattattattcattagggcaccattctgaagaaaaaatgcagatctagagcattgggaattaccaagatacagtcaattttacctgattaacagcagagtaaccagatagaaaatcaagatatttgtttccctctggatcccaaacagaggttccctttgcttgagaaaatacaatcggaaggggatggtaactgcatttgagacaggaaagatcacttcaatatttgaccaaaagcaattaattaacctcattaacaattaacaatcaatacaaaagaaaagtgtgaaaagaaaagccacctaaacaagtaaccaaaagaaagctatgttcaataccaaccagataagctgacagccaaaaaaaaaaaaagcaaatccccacaatccttttatttgtaaaaatgctcagaagagacaccaactgtgaatatttactattgagagtgttttaaggaagcttcaggcataaagaaactggcaaagtgttgctggtattttttttatgctcaggtgatgaagaaacagaataaacatgattgcattaaagtacagtttttggaaggcactttcagcttactactcatgattagttttaagttttctttttaattatacaattcaaatattccaatgaatgattcaaaaacttatatcattcattcaactcaccaaagtttaacccgatccaagtgggacaacaacatcatcagatttaaacatgaaaagttagagtcgagaaaaaataagacaaacccatacatcaaaatcttgtctttggggcgtagcaacatatggcctaggttgagagaaggaaagaaggagaaacgtacttgtgggcactatgttcatattccttgtcgatgattttctgagaagaagatgaagaagaagcattaacttctgtggcaaccccaaaacttctacttcccctgcaaacccttcgtaacaaacactgcaccggtctcgtggcagccattgatgagagacaaaggttcctcagatttttcaggattcaagcgaatgtaagatgaaatgaaagtagcatgttttaataattgtcaccctctctgaaatttttttgtcaaccaacatgttttactatattaaatatcaaattaaatataatatttaaacatcaaactaaatatccatgatagtatttattttaaatttttatggattactatcctcttttaattaattcacatctttcaaaaaatactaattaatttaattaataatattaaatataatagtaaaacttattatctttctattcactttctacttaaattaatcaatgtgtattaattttattcttcaatttttataagagagaatacattattttttaatttataactttttattataaagtaattaaaaatattttgacaaaaaaataattaatacaaaaagataacataaaaaatattatatttaaggaaaaataaaacaaaaaaattatatttgggaacaaagtagtataaatttaaaagaaagaaaagtaataagataggattaatgttctaacagaatttaattaaaatatattcacaaaataaaagtattttacactattatttacttattttataaatatcgttaatttagttttattaataataatctgaaaaactatattaacaaaattttcttattacttaaccgtataatatatttttttgtaacgacagtgcatactgcatagtcatgaaatactaaaaattataataaagaattttatttttttttgcaatataaagtattttccattttagaaaaagtgagatgagggagggaagattatgatgcgtcagctgtgggtgtcgttttcgccaactttcaaagcttatcagacggcctcgaattcccacatgtaagtgcgtgtttgtgtttgttcgatcaaaagtaacaaatggttacttctcacaaaatgacagtttttaaaatttctgccaactgaacttaatgaaaatacaaacacataatatgttactactatttggatcatgtctggatctttgttcccacttccatactccaattggaatattggatttgtttcatcaacggctcatcgatataaatacacagccaacaaataccacgatacactgtcgatcgattcactttgtagtatcttttttatcatattaatgttgtaaaaaaatgaatttgaaagcataaaaaaaaaatctattttcatttgataatttaaaatgctgtaagaaatttataattattcactctttggatcattaatcgtaacctttgacaattgttagtcatcattatcattattacgtagaaaacccactcttgatattttttaaatttatattatcattctatcgctttcatttttttatcgcatagttccatctccacggccatcaggttgcgtacacgtataaaatcatacacctgacagcctacttcaaattgctttctaagttggatttacactttcccgaactacattacaaggatatcaggatatgcattataaataacgaaaattttgcattgcttattatgaattttaatttttaataacatttacaaacattttaaaaatgtttaatacattccaaaatataaaaaaaggagaaatattgactctacttaaaatttaattccattgacgccatcaataaaataatattattacattcacataaaattatcttgataatgattaaaacttaagaacaaaagtcagacatcgctatgtcgttatttacatgtttaaacacgaatcgcttcggagagtagaggagacggtattccacaaattcacaattttatatttctccatcataatgagtaataacagccataaagtgttcacgaccattcaaactataacataatctcgtggtcttgtggaaataaataaacctcgatttatatatatatataaaaaaatcaatctttcaacaagttataatggcctcctcaaagaaaaaaaacaagttctaatggcacaattgctagtgaaaaataatgaataaacagggtaacgaatgagaatagtgaactggaaactagtacccacaccaaatcaaagatttaactatcacactacaatacattgcttgcttaccaatacgaagccgcgtacaacttataataattaatatgattgtcatttttaaagattttaatttgatttttcgttaattgaaagtcaatatcacaaattatgtaaaagattgatgcttatataaaaaaataatttgtgagaagccatcgaattgattagctcaaatcaaggttaaccatttgcccaaaaaaaatatatgcaaaatcaaagaaattgcagcgccaaacatatactaattagatgaagttcaattaaatgtaaatacatacgcaaaaaacatcaaagcaactgtcttgaagctaagctgtatatacaatggaccatcatcttaaactacttaatgtgcaccataaatcatatacaaagtgatactctaatattaacttcccctacgttcagccccccaatgaaccatactcaaactaaacctccagcataaaatgtctcagtgcagaacattatcaacctatcaaattatatccattaaaaatcaacggcctaatgactaaactcaaactaaaccagacatctttacttaagagaattctagcagaaaagctaagggggaaaagaatgaacagtattccgtacaggatcaagaatgagggtttgaaaatttcggaaatctgagctagctatagaacaaagggagaattgatccacatgcatagtattatattgtattttaagattcaaaagtattataacgaacataattgtgctgagttcattgtggagagagttcaatagatggctaatgaaaaataaagaaaatttgtactttaaatttgctaggaaaagcgtaagtttgacattatcccagagaagtatcaagttaatagcattgcatataatagatagatcataatggctaatggaataaagaggtccgtcacatttcaaaaaagggaaaaggagttttgagcacactgatgttgcaactagtaatctggatgagagaaatgtttcacaagatggcagtatggatacaagggaaatgtttctggaataagatggatgatttaatctagttgcatcctataatttagtcatataaaaaaccccaagctattgcccacaaatttaattataacttgagttgggtgaaatcaccattagagcagaggatgttatccatgtcacggtaactataatccaaatttagttggaatactaaatattatgctataaacaggaaaacaaataagccagaaatggatcaaccggatcattttataaattcaacagcccccttcatagaatttaggagatcgagttaaacaattctgaatcatattggaagagaaggcttgctacattaaaatgtgacagctagcaaacataagatgtggctcagatgacaaactgagctccgtgtgaacaaactttacctccagtgcagaggttcaaattccactggagatatttagcaaatattttcttgtgattgacatccatcacaagtcataagaaatggaaagcatgtacaagttccgaaataaaatccagaggcttttcagataatatgcatgagttgtgctacacaaccaaaaaattgttagaattctcacattctgttggatcaagacggtaataggagaccattcaaccatccaagagtcaactcacgattcttttctttgttcttaaatgtcttatgttttcgttatatgccaaggaagaagaagctgtatcttcctactttgtatttatcttctgtcttaatattttaaccacaaaaaatatggcttctagcatttttgtacatcatgtttggtgtgacaacaagatggttatatgatatctagctgtaaatgtcctcatgcatgacagaattacaagatatggaaatagaattagggcgatgaaaatgatccagggttttccgaaatcctttgaattcatgaggcaacttccccacttttgaataaattacttggataaccaaggatacgagaaagcacagattgctagaggcccagcatctcattttgcatcaatagggaagatattttcagcaagaaaggagaataagagtgagccgtcagaaacataacaaacaccgttttatggttccacagaataatttatggagatagtgatgactacacactaatcaaagacaagcatcatgaaaggacagagagatcctagatttctaagataaaacccagatgagaatagattaagaggaaacaaaaggaaaggaattataattcctacatacaaaaccagcaatggatcctcaggcacggtcctgtagccactggtgtggaagaagcaggattcaacctgtaaaaccctagagaacattgtctctccaggaccaacctaacagaataaggagaggaacaagaacatgcttcaagaattaaacttttcaccttcaataccccaggaaagaatttcaataattcaggttgccattataaaagcctggatcaaattttcagcagcacgcttttgttcaggtgtccctgatataaaagcaatacgatcaccacgagcagatttgttgtcagatatctcaattgatgctcctgaaatctggtttgaaacaaggcattaaataggcacatcaaatgaagcaaagtttgtattagttttacctatatgcattggggtatgggagaataaacaaattatcatgggtatgggagaataaacaaattatcataaaccaaagttgaatacagtttattatgctaactaatctagcccctgacattgtatagaacattgtatactcgagaataaagtagcataagcaaaggaaaatatttcataaaatagtttgcatagaaggatctcattagatgtcatcttgtaaaatgataccatggcctagcaaatgtgaaaaaatggaaaaaggttgccgatcaaagactagggacacccttaaccttttgtttcctaattagttacacatcactaattgttttagtccaagacaaatcacttgatatgattaaaaaaattggatgtccattatctcctacaaataactggactaaatggaaccagtgcaagtgagcaatcaataaaatcactcaccaccaagaataaatttaaaaaaaaaaaacataaatatatatatatatatatatataaaatacaacctagccctatcctactgggtgagttggttagatggatcaatcaacaacaaaatattcagcaaaaccatttagagcctttccttttgattggatatcttctaattgatccactttactcactgaaatgcacgatatggaatttttaagaaaagcaattattttaagcatacagtgaagagacatacagcagcaagaaccaaacctcaaattagtttttaagataaataaaaaataatagataaatgtcccatcaaatattagttccccctgcaattacataaaagaataaacaattcagaatgtgtgaactaaccttcctgatattggctatatttgcccctcctttacccagcactttaccaacagcattagcaggaatcaacatatccagagttgatgggggaggcaaactgtgtacaataagagaaaaaaaaatacaagttcaaccaatttaatacaaagtttaggaaagttaaatcggagattaagtgcatgattgattacgcccaaatccacgattagactttagagggtaaaattgtacaaatacaaatacaaaccacaattaggaaaattttcatcctcaattcgacgtgttaggcaaaagtccagttggggatggcaaatggaatctcattctcaaaccatggtttgggtgaaagtgagagtttctttcataggattgggaatgcacataatcaaaatattacttttaagataaaggcatccaaatataaatcactcaactgcatacccagttttacaaaagtcgggttcatccaaaatgagtttagcaaattccaatccaaacaaacactaaatcatcagctataaaagtgttcacatcatatataaatgtatgtatactaacctgccatacagcttggtggcatacgaggtcatagatccatagccattttcctccatctattacataggatcaaacaaagagagaaaagattagtgacacaatatttgaaactaaaaatggaaaagacatgaaaagaaagagactgaaaactgttcattagcattctgtattagaaaaatagaaaaatatatcataatatacctgcaaaaaattatcaatattcttatgaccatacagcaagaaaaaatgtgacataccgataaagatccatatccaccataaagactgcttgaagaaagcatgcccaggccagctccactttcagccctatgatcataaaccatcggagcagtaacaggaggaactgaatgcatcatagatggcaatgaaagaccagcactgcctgggtacaaggattcagcacctatcaaaggattatggccagtatccctttctctcagtacatcatctctaagtcttaagataatctggattagtgcatcgctcacacaatcaactgagccacccacctaaatcccaaaaaacattgaatgaaataaatatgaaagttggtaaggggtatcaccgttgtgaatgggttttcatgcatgaaacatgaatgaatatttttaaaagaaaataattgtcagttaccatttacttttcaattttgctgtttacctattaaatcatgattggttgctttttaaagaatcacaactttcctataaaagctttcattctaaatagaattgctgaataaatatactgtttaaacaaggagagaaaatgagtcaaacctcaacaagttcatcattagcatctgcacattttggcttatcacctttagatattcgaacatcagccttagttctcttccgaatttcatttatgattgaaccacttttaccaataatacaacctatcaccttggatggaactagaagccggattgaaacagtggtatcgtcttcatcatttatcttcccttgcatcagcagaacagcttcaactgccattgacttcagatcacttggtgactaaaaaagacatatccacatgatcattatccattttatgataaaataagactacaagtatagaatcaatatgttttggaaaaggatagttacattatatgaaaaaaaaatagagaatatgggaacaacaatccacaagtaaatcaaacataaaactgaacttgctgtacattaaccatattagccttgggggggaattacttcagaacataaaagttgtgacaaaactgtatacttaattgccacctcacagaatgctcaataactattcacatgcctgaagttattgtattttagctttaaaggcacatgtaaaaatatgatctgccaatattttttgaaaaacaccctttgtttccttttccttgtttctttccggaatgctgttaacaagtataagtgttgacttcctaaatgaatatcaatcctcattattgtaagggatggcactgcaaagcacaaggtagttgactattaacaactatagatctaacctgttttaatggatgatatgcatgaaatttattacagcgaaataatagagggctatgtccatgaaaataaatttgacagtattcagcaaactagtaaatagcaacctggccaagacagattggagataaacttgatgtaaaaacgttaaaatgaaatgaaatttattgtacataattctgactataatttgtagagaaaacacaaagaaactagggatcaaacattttgaacttttaaaatgcaaaagcatatacacaaagcttaacacaaatcactcaaggtcctgaaaatcaagaatcaatcaactcatgacttcataatcaagttttaaattatttttctgttttctgattattgcatataattttgagaaatataactacaaaaataagtcaaaaaaatcattggtaaatagtaagggtcaaagctttcccagttgaacagcaacacacatatagctttgattatttttctctcaaattttttcagcccaaggcactctagcattttgattatatactgtccagaaacaaaatatctaagctaaacaaacacacactagggtacatcatgaactccatcaaatgcaacaccgccaacaattattggatgagcaattttatgttataagaaaaaaaatgtaacaaggaaagatagtgcacctctgttgtagttataatgattaaacactcatcataattagccttggaatcatcaacctcaatacgagcaccacttgcctgcctcatacttttaattgtactaccacctttgccaatgacacgcccaatcttgtcagagggacacaacattctaacaattaactcctcagaccgggaagcaccaacaccagaaacaactggaagggcagatgagtacagaggccatgaatttcctgcatcagcataaccttgcagatctggtacatttgttgtgcctataatttgaggaactgctctagatgtgacaataggatctgaagctggatatagtccaccaggaggataaattggaacatcagagggaataataatactgggtagggcttctggtacagctgtgtcaagagagatgtcctccctgggaccgaacttatacataatagatgaaactgcaaatagtgctcttttaactgcttctgattcaccagtgatctactcatagaaaaagcaacaacatagtaaggaataagtttactgcaaaagaacttatcttgacatgaaaaaaaaatgattaaaaatatgacaaaagatatagaaatttcagatttttctaaaaactaaatgcaaaaggacaaacaagtacgatactgttaaatgttaaataaaaattatcaagttcaatgtgtacaattagaaagacaaactgtaaaaagacttctacgccaatacatagtacgatactaatacattattagtaaaataaagtattaatattggcatgtgtcagagggtggaggattagatgctactattctaatcagagaaatgattacgaaccaaagcaataaatcattcaatgctgagttttataatactcaatatactaaccaagacaaaattatcaaactccatagcacatgtgtgtgttggatcagctgcatccttggcagtaaccttgatatttgctcttgtcttacttctcagctttttaatggtagccccagccttaccaatgatatttgcagactggctagatggaacaaggatttgacattcatctctatcctttcgtttcttctcagaatctccaagagctgctatggaattcacaatggcaacgtgaacctttagaagagcaccttgggcagcacacagaggttctttaccagcgaactcatcatcaatctcaacatcttccttctccttaacatagctgtagattgttataacccgatccttggcaccgggaaaaggatcgacaaccttgactttagccctggtttcttgccttattgaatttatcactttcccattcttcccaataacactcccaataacttcatctggacagagtatcctataaacaatcaattcatcattgcccctgtcatctctgtcagtcattcgtctcttttgatttttcctgtccccatcatggtctctctgtgaatgatatcgttttccagtctcccccattttacaaaatatcacccaactcctgaaaagcaaaacacaattttagttacataaccagtgcaaatatatacttctatttgttagtctctgaccatcctccctcccttattccccttctcataaagaaataagttaaattaaagcaataaatatcacacctgcataagcccacttttaaatattcacaacgaaacattaatacagccaaattgaaagttgaaactgctttcaaattcgacagtatcttttatcacccaaagtgcgaccaacgagcacaaataattagtgcagcaaaatttggacaaaaaaaaaaatccacggaacatttagaacagagtaaaacggagttagaattattacaaaaaaaannnnnnnnnnnnnnnnnnnnnnnnnnnnnnnnnnnnnnnnnnnnnnnnnnnnnnnnnnaaaaaaaaattgtaacaaaattgtctcttaatcaatttaagccctaatttagttccaactaaaagaataaataaataaataaataaaaatcttgaaaacgctgcaactgaacactgctacataaggaaaggaatgcgggatatagggtggatgtgtcaaaccgaagattttgaacataccggttgttagagagaacaagagaccacacgaaacctaacgagagagaagaagaaggtgggtcaaggctgcgagcaatccaggattctcattctcggaaccctagttttaacgttttctcttcacaatgatttgtttcttttcttttgatttatttattttgaataaataaataaataaatattcagaaattaaaccggtaatatttttgtccaataattacggcaattaactttaaccagtctattagtgagataattatattttattttatataaaataaataataaaataataaatagtttaaatttaaaattatactgatattataattacatttttaattaattaaatatttttaaacatatgatatattttagatttatagtaataatacatattgtgatataagtttattttcttaaatcaaaatacttaataggatcggatatatttatacaaaacttctcagcacacgtaattaataaatgataatttaaagaaattgaatttcaattgagaaataaaaattaaaaagatatattaaaagnnnnnnnnnnttaataaaaaatttaggttataaaagatattgaatgttaaaaaaacagataaatttaaatattttaatctattaatctaacccaatctaaatcatttacaaataaattaatttggtttagtttttaatttttctcttagaaaactaatcaaaacgaattcatttaaatttaattagattgagttacatacttcactaagtctaacctaaattgatccacatattgataaaaattcttcaaattgatgaaaattcgtgcagtgtgattgatatattcttaagtacagctcataaataaatgttggatattttcttcatttcataataattattgtgtaagaagataaaatttatcttaaaataattattattttagttttctaatttaacagtaattattttttttatttatatatcttgtaatattaatgatattgattaaaaaaataaattgaaaaatgataagcttaattttgcaataaaactataaaattttaagaactgtgtgacatattaaaaagattaaataacgtgtaacgtctgtgtcttcacgaatacctagcccactctgtatttctttcccttactttcaagttccgagctttactttcagcttcaacactccaagccttaccaggtaatgttatagagtgtttcttcctgcaccattcgttatttctaatacaccattcataaacagtacatttccaaaattgtccttcgcttttttgcagtttttataaaggatccgtataattcatgcttacggattcgtcaatccgtaagattcttacggatccgtgaatccgtaagaatttacggattcgtgaatccataagaatcttacggattttccaatccgtaagttttttttttttgcatgtacggattgggcaatccgtaagcccaatccgtttggtttttttttatatacggattgggtaatccataagcccaatccgtttgttttttttttgaaaagttaaaatatattttagaaaataatggtgcaagcaagtatcgaacttgtgacctttaagttattaatacgatgctctaaccaattcagctaatagactaattatgtcaaaaactaattgatattgatatatatatatatatatcactaaatttatttaatttaaaataatttattatattaaaaaaatattgtattaaatatacattgaaataatttaaaataattcttaaacattttttaatgttttttatccttatttttgaagctaacaatttatttcatatcattaaataatttcatagatatgtaaattataatataaattttacatataatttatagatatgtctacatgcattaattcaacatgtaattttaacatataatgttattataaaatttaacataataaattaaactataaattaatagctcaattacaacatcaacatcaacaacatcaacagcacctttaacccaaattaattggagtcggtggtagatgaacccaatgataaatcgaaaataaagcaaaaattaatagctcaattacattaaaaaataattaatgttgctaatataacactaaaattttcaatgtatatttaatacaatatttttttaatataataaattattttaaattaaataaatttagtgatatatatatatatatatcaatatcaattaatttttcacataattagtctattagctcagttggttagagcatcgtattaataacttaaaggtcacaagttcgatacctacttgcatcattattttctaaaatataattttaacttttcaaaaaaaaataaacggattgggcttacggattgcccaatccgtatataaaaaaaccaaccggattgggcttacggattgcataatccgtatataaaaaacccaaacggattgggcttacggattgcccaatccgtacatgcaaaaaaaaaaacttacggattggcaaatccgtaagattcttacggataatcttatggattgacgaatccgtaagcatgaatcatacggatccgtgtataaaagctgcaaaaacacgaaggacaattttggaaatgcactgttcattaatggtgtagtagaaaaaacgaatggtgtaagaagaaacactcaatgttatatgatgttatctatcccaattcccaaatatcacattcttttcctttcggtgaaaacgctacaatccatagacaactaatattagtctatataactaaagataattatttcttttatttattgtacacattttatcgaataattttactcttaaaaattactttttaaattttaaatttttcttcaaatttacattaattttcactattttatattattaatttgtattctattatttttattaattatatttaacttctattttttattatttaaaaagtttagagacacacttcccctaatatttataattgcagaaccggccttgaaatcatgcattctcttctgccttgcggttgtcgttcactgtaacttctcgttcggtgagtgctatgatcatcacatcacaccacgtgtgcgcatttaatcaattttgacctacactgggtcctggaatgttgtctatacccttcacttttgaacattagaaaggataaacatcatgtataaaaaaggttgaacaaaagaatgcgtatacctatattacatatgaaaaggttaaacaccaatatgcaaaaaagtttaaaaatcataaaattagtacctaggacgggtcgagaaactaaacccctgatggaggtggatcgaaaaggttgagtcttgaggataattaataaacatcacagacaaaaattggcgtggagagctcaagcaaaggtttgaaatacaatctgtaaaacatgttccaatagttagaaagcttctccaagatagcactgaaaataaaccaaagaaaggggaaaaaaaacataattataagattaaccattgtagtcacttgtcaagagagaataaaacctaccaggtatctttagaagagtgatattgtagtagcaataaacaagaccatggatattgaaatccagaagttctagaacattaaagtacacaatctactgaatctagtgttgagcttctggaggaaaagtgaaaatcaaaataagaacaaaaggtttgaacattcagtataaaaaatcctacatttcctctgccaaatctccaatacattcttattgagctagttttctgtctttgatgttttatttgaagcagcggcataatatccaaaaattattgttttttgatttgctgatcgatagcaactttggttgaagttattaattgggtgagtgtctttgacaagacttattttttaagaacacacaccaatatagatttttatttatatgcacttagctgtcattgattgttttttacaaaattttagcagtgcaagctgacttacatggctgaaaaggaaccagataccagtggaactctaggggaaagtcgtcccactccaccattaagtggacaattgaaacaactctagtggattcacctactgatgccaacactcaatcttcatttgaaggtattccatcttcacaaaaggtatgtaacaaaaggcagtgtagatatgaggatgaggattatgagcttatggaatccggattcaactaagaaaaatgtagatttgcgcctgcaaagatgattatcatggatgagttcagttaacaaaaggcaatgtagatatgaggatgaggattatgagcttgtggaatccgaattcaaccaagaaaaatgtagatttgcacagaatttattagtgtgcttgtgcctcaatttgaaatttccagttggatgaccattgctagagattgcatggagttgtacagggtggaaaaggctaaattggaatctactttatctcttaacaagcaaatggtatcattgactaccagtacttggacttcaatccataatttgaattatctgtgtgtgattgctcactatattgatgaaggttgggaattaaacaagaagattttgaattttggattgatttctgaccaccagggggacatcattggtaaagctttagagaaatgcttgaaagagtgggaaattaccaaaatttgcactattatagtagataatgctaatattgagaatttggctttatcatatttgactcgaaatatgagtgcttggaacggaaccaccttactgaatgaggagcacatgcactttaggtgttgtgcccatttattgaactcaattgtatctgatggattaaaagaaatgaattgttgcattgctaagacaaggtctgcatgtaagtatgttaagtcatcttcatctagattggcatgttttaagtggtgtgttgatgaggcaaatataacttgtgaccaaatgattgtgctttatgtgccaacatagtggaattcctcctatttaatgttgaaggttgctgaaaagtttgagaagacatttaatctcctcgaatctgaggatggttcttatgtgaattgtcttgattatgaaggacgaactccaaatgctgatgattggaatcgtgcactcgtatttaataaggtttttaattttttttatgaggcttcactttctttctctggttatttgaacgtaagttctaactctttcttgcggatgtgggtcaagattcaaaatgcattgagatcatggatggagagtgatgattctgggctgctacagatggcaactaatatgaaattcaaatttgacaagtatggtgatattgatgggaatattaataatttgttgtttgtggctattttcttgatcctcgattcaagtttaaatatcttgaattctgttttgggagaatgtatggtcctgaaaaatgcaaggacatgcttaaaaagttggaagatttcataaaaaaattgttcgcaaagtatagttcatcgcatcctattattcctgatatttgtgagtctagtggcctatcctttgatgttaccacccaaaaaattgtgagtaatggtgatggtggtattatggatatcaatgaggagtacgggataacagtgaagaaaatgctaagccacaaagcatctagtaatgactacattttaagctaaattttttgcaagaatgatatattcagtaaacattaggaagcaccgcttcagtgattttggttgccaaaatcgctaagccacagacgacaatggggactctatactttagtaatgactattcagagtaaagaagtttggcagaattctagatcattctggatgtaagaaaacctggtatttcaaagcatctagacttcttggaaatcccaaatatgtgccggagttggtgtactactatttgcttttgtcatcgtgctttatgaattttgtgaacaattatcgatatatatccacctatgctattaaatttgctctcacttctacaatatttgaatttattgataataattaagtactatgatgatgaatatactgtggatatattattaagttattgccattattaaagaatgtatttggaaaggtgtcaagagataaaatgaataattagattgaacaatttgagcttgataccaataaagagtgtgatgttttgaaagatgcttctaacctgagtgtagtgattggtgggtatgcaataagacatttatgaaaaaaactacaaagaacccaaacatatgcatcatgcatggggtgtgaattattgcaaaggcatcccattcgttgttacaagatgttctgcatgcaaaataaaataaaaattataaagtttgcactaaattagtcaaacaaggcttaatgtccactaatctcatgaggggtgatgggttgcaatgttctcaaatacggtgtgcgatgcgttagaaaacagcactttaagaattggttcaactatccgagagattgtaattaaatatttctatgatgtattacttgctttccttatgttgtcctttaaatttatttggccacaacatttcatgtttgatgatagtcaagccaaaaattaaaatgatcaacaatattggtcattttttaaaattgtcacaggaatgagcaaggttcattattttaggaataaaatgctgaatattattgatgcaacgaactagcagaaattacatcgtttgcaatgatttaatccacttggtaagggacctcctcaatccaacgtctatcaaaaataggtgaaagataggaaactaagcaatgtgttgcctggttcccttgtcttttggtaaaaacaagaacacttattcttgaattggggcaaagcttcctacagtcatctacaatgccatgaaatgaaacaaagactagctctggtcttctctctttttccattgttggaccagctgaaggcagtctgagcaaggttcattaaaagaaagagtgattttgagttctattttaaaagttaaaatattattattatgcatatattttattttcaatttaattattaacatgaattgaaaaaaaattgttaaaagaattatatatggacattaaaatttatattggtaattacatatttaaaattaattttaactaaaaatattcaaacactattctgtctgcaaaaattatttttctgatttactttgtctaaaagaaaacgcattgattgaaacttacttttgcaatgggttctttggtttggtggtttagttatttagcattgtcagcatcagtaaccgacaaagaaaaaccaagtggtcctctactctgttagtacgtgctacagaaacaggtgaaggacagtattatttttctgatacattatttataaacgctcacccaaattcaaaccaagtaaaataaatcttgtcactgtaagtttgtttgcacattattatgctttttcaagtttaaccaaaaaatattagttataattttcacgttttaagctacattaacgtgtttctttgctttctaatcatcagtattaaaactaaacatgcaaaaaatcaggatgagttaaaatcaaatatatccagggatatcctaacacgttaaacaacactgcaatcagcaattcttacttgtcacttctacggttctaccagcgatgaaaactacgcgaggttattcacagcaaagtctcctccctatttatagtttttaatttcttgattaaggatgagtttatttaaagttaaaaaataattttaagataagtattttttatataacaattatttttaaaaaatagatgggatttatttttaaaataaataaaattattttttaaaactaaaaaatttaaacaaacacactaaaaatatttaaaactacttattttattaaataaatatttattttaatatataaatttaaacaaacttactctaaacctggttattccagaacaaaaagcacatcgtaagcttcacgttctcgtatcattatatactcagtgaacagctgagacagtttccatttttaccataacttactgttttgcgagtgcatgtaatgtactcttataaatgtaatacaattaattgtcatacaaactacttttttaattaaaatttgaattaataatgataaaaaatattctttttaattgtaatcaaattaatttgattacttttatatgtggtaacttctaaagtaattaattcaattttaattagaaaagatcatttatatgatactgattaggttaaaaaaggtagtttgtatcttaattaatttaattttaatttaaaaggataatttatatcatcatttatttgattggttaaaaaaagtaacttatatctataattaatttcaatttatttcgtaaaagtttaacaaaatgtatttatattgtgtaagagtgggtgaaaataatatacaattggaaatatatttcggttatatactttaacacaacaaaattgtgtttatgttattattttaatataaatacatttttgttgtataagagaaaaaaaaattacacaatgaaaatgtgatttcatttaacaacatatataattgaatcatgtttttattgtatattttttcacaccccttcttatacaatataaacatgtttttgttgtgcattttgtcaataaaatcatgtttatgtgaaaatagtnnnnnnnnnnnnnnnnnnnnnnnnaataatatatatatatatatatatatatatatatatattctggattaaaatactatttttttacccaaaaaaaattagtgagaatgcatgcggatatatctacccctgcccatacaagttcaaaaattttaaattctgaaactcttgtagtatgtagagttctgtaatgcatttttttgtgtgtgcgtgtaatgtattttatattaagggtatggtagggcaaaattaattgaaagttaaaaattaattaaaaattaaaaattagttttattaagcatttaacaaaattaagggttaaagtagttgaaaagtgtaaaatgaaagaaaataataaaataataatgtatttaaaaaggataactaggaaattagataaatattttgaggataaaaatagaaaaaaaatataaaaagttaaaagttagatgttttaaaaaatgttattttaaggttatgttccataagacattttaattagtttttaactttttttatgagctaaaatccgtgtttgatgttaggtaaataattttttttaataatttctaatatttttttaaacctacttcgtttttaaatgttaacttctagtatgttatatttttttatttttattttcaatatatttattcaattttttattatattttttaaataaatcatgattttattattttattatcattttatattttttaactgctttaataacatgattttattattttattattattttatattttttaactgctttaataattaattttattggacatttataatttaatacgctttcaaatatcagttagttaattttttaattttcaactaattttatcaaatataatccaagtaacattttaaaatcattagaaatttaaaaaaaaaaaacttatttattaaannnnnnnnnntaaacatgtttttgttgtgcattttgtcaataaaatcatgtttatgtgaaaatagtattttcaaaaaataaaatctaaaccacgcttggaggtgcaaatagcaaatttagtagtgagaataacaatttcataagatgtttgaacattgtggacaacgtgtttgatgcaaatctagctgatttttttaacataactatataaaaaaatgctttcttgattagtttataagataaaaatactaactaatgaacagcataaaaaaacaatattattatttattttatcaaatttatccaaaagctccttactcatggacacatggttaagcagccaaagtccaaattattatataccatctcaaacaataattggtaaatgcttcacattgaccagagtaatattattcataatcacatgccctcacatgtcctcaccacaaaggcttggagattctcctattgtttaaccatctagttctagtaataatttctcacctaattacataacatgcatttctttttcagaccccaaaagaaaaggaagaaaaaaagaaggaaaagaaagtaagaaacccatgattgtttctattgatgtcacaaaccatgatgcacaaattcattaaactgtactgcaaataaatacaaacagacagctggccttctgcaccctccacacaacacaacaacaacattaacaacaacacatacactaattagtctctcactggtcactactttgcagcacactcttgagttttgactctccctacctcgcagtttcatggcttcttcagtgaccagatcagcctcaggcttcagcttctcagagatctggctcttggtggcagccacagcactcatctgtggctttctgggttacatagtttatgatgcaatcatggccactgcttctgagttgctgcaacgtttgctggtaatttctccactgttcttgatcatcattgttcactggctctccactggaagccaaataagcttccccatgccaggatctgagcctagtgccatccacagagctggtggttccccttggggtgttgcatttgttcttcttctgcttttccttctcatttcttaccaaccttccctgcatgaccttgtttcttagctagcatgtactatatagtttattaggctatgaaaatttagtgcatgtcacttatgtggggtgcttgttccttttttttttttttaccagctaattattagtttgttaatttttgttagaaagaaaatgcgaacgtaccacctttctttttttcttttcttcttaaccactccactaatcttgtatcttctataattttagagttactgtaactcataatgaacctgttaatttctatgtgaatctgggtgtaaaaactattgcagtgtctctctctgcctctaaaagagtcttgcttttcctttgtagcaaattttgtggctgcttatattaagtttcgagctttgctgccctatggcaggtgtttgtccttttctctgagaaaattgaaatgtcgcggtgtgtcaaacatcaaaattaccaaggaaattggactattatatatctttttattttggacttcatctgttggtgttcatatctaaatataaagtttaaaataatcaattatttctcagatgaataatccggacacactgtaagtctttctccggctttttttttcattcaaccaaaaatctcacattccatagactaaagtaattaagaacattttcacgaaattaaggatttaacttttataaagttaagtcatgaataatatatatatatatatattctggattaaaatactattttttttacccaaaaaaaattagtgagaatggatgcggatatatctacccctgcccatacaagttctaaaattttaaattctgaaactcttgtagtatgtagagttgtgtaatgcatttttttgtgtgtgcgtgtaatctattttatattaaggctatggtaggcaaaattaattgaaaagttaattgaaagttaaaaaattaattaaaaattaaaaattattttattaagtgtttgataaaattaagggttgaagtagttgaaaagtgtaaaacgaaaaaaataataaaataataatttatttaaaaaggataattaggaaattagataaatattttgaggataaaaataaaaaaaatataaaaagttaaaagttagaagttaaaagctaatattttaaaaaatgttattttaagattatgttccataagacatttcaattaatttttaactttttttatgagctaaaatccttgtttgatgttaggtacataaatttttttaataacttctaatgtttttttaaacctacttcaagtaatatttttttaaatgttaatttctaattttttatatttttttattttcaatacatttattcaattttcttattatattttttaaataaattataattttattattttattgtcattttatattttttaactacttcaataacatgattttattattttattgtcattttatattttttaactgcttcaataattaatttgactggacatttataagttaatacgctttcaaatatcagttagttaaattttttaattttcagctaattttatcaaatataatccaagtatcattttaaaatcattagaaacttttaaaaaaacttatttattaaataatcaaataaatttttaattagtaaaaaaaattaaaaactacctcaaattactttgtaacatggctaaataatggcgtgttaattgtccaacctaggcctacgcatttacgaaacaaattcaactgctaagctacgaattcttgaaagttttgaaagaaaaatccagagcattttatagaattttcccagtcaccaaatttgacaattgccacattaaaattgtcatgattcatgaatattgtcaaaatccaattccttattttccatagtatcgttatgaattttcctcaggatttttattcaaacactgtaatctttaaaattcatggaataaaaacaagtattctattgtataaaaaaaaatataaaatcattgaacaaattgcaagagatatcatgttagtcaaaattaacaccgttaggcattagcaataaaactgaccaaaatatcaatttgatctaactttatgggactataagagaccaaatcaaaacaaaaaattaaaataaaataaaaaacaaaaaatatattttaaaaatcctttattttatagtaatatatattattaataaagggaaaagttccttttaaaaaattaataaagaaaatacttaattacatttagtatacacaattcattaaacaatttttttgacagaaaaacaattttattcttaaaccatttttaaactttcattgttctcttttaaattatgataattgcctcatcattataatactattgtaagttttttcttccctgtcacccttattttttattaaactttttcctaagggtgttcaatggtatggatcacccgagaactcgaattgattcgaatagtttgcgttgaatcatttatgtatttggatcaaaatcaaatcgaaccgatcaaaatcattcatgtatgagttgagtcacgggtttagatttatagatttattgacccattgatctgatccgtgaacccgtaataaaaatataaattttattacatatatatgtattaaaattttaaaactaaaaaaatattttgacaataaaaaaaggtgtggtactgtaaatgnnnnnnnnnntaaaaaaaaaaaacttatttattaaacaatcaaataaatttttttaattagtaaaaaaaattaaaaactacctcaaattactttgtaacatagctaaataatagtgtgttaattgtccaacctaggcctaacgcatttacgaaacaaattcaactgctatgctacgaattcttgaaagttttgaaagaaaattccagagcattttatagaattttcccaagtcaccaaatttgacaattgccacattaaaattgtcatgattcatgaatattgtcaaaatcaaattccttattttccatagtatcggtatgaattttcctcaggatttttattcaaacactgtaatctttaaaattcatggaataaaaaccagtattctattgtaaaaaaaaaatcattgaacaaattgcaagagatatgatgttagtcaaaattaacaacgttaggcattagcaataaaactgaccaaaatatcaatttgatctaactttacgagactataagagaccaaatcaaaacaaaaaattaaaataaaataaaaaacaaaaaaatatattttaaaactcctttattttatagtaatatattcataattgttaatatatattattaataaagggaaagttccttataaaaaattaataaagaaaatacttaattagcacaattcattaaacaattttttttgacagaaaaacaattttattcttaaaccattttaaaactttcattattctcttttaaattatgataattgcctcatcattataatactattgtcagtttatttcttctttcacccttattttttattaaacttttctctaagggtgttcaatggtataggtcatccgagaacttgaatcgattagaataatttggattgagtcatttatgtatttaagtcaaaaccaaatcgaaccgatcaaaaccgttcatatacaggttgagtcacggatttagatttatagatctatttactcaataatccgatccgtgaacacgtaataaaaatataaattttattacatgtatatatatgtattaaaatttaaaaactaaaaaaatattttgataataaaaaaaggtgtgatactgtaaatgtctggaccgaataaagggtcaacttataatcatctcatctcatctttgttgtgaaggtgtagtactgtaaatgttacaggtttaggtttctttttcttttgcgtttttgtattctctctcatctcatttccttctctgcgtttcagccacttctgttctctctcatctcatctccttctctgtggttctgcatcaactccttatctgttctctctcatctcatcaaatcgatcaagtatcaggttttcttttgcgaagctttttaacttcttgtgattattctggtttgtattcattgggattttgatggaaacaaggataggaagaaaagaaataaccttcattgttgagtgttgaatcgaatttttgttgttgtatttgatttactgtttttttttcttgtttgctttataattaagctaatctttggtaaaatcttaagagagaaaaatgtgtttatttggattaaagattgagagaattagtttcagagtgaggaatagttagggcctgattttttttctcttattggttgatttattctttgagagtttgatttaaatgatgtttttttatttttattttattcttttaacattctttgaaagtttgatttgaatgatgtccttttttttttcttttgttcttttaacattaaggttacttaaaaatcaatgttcaacttgaccaaaataatgatattactttttttgttaatgattgaaataatgtcatttcatcataaaagcaaaaacattatattagtataaaatcaatttatttttgggctaataaggttgtatttaaatttttagaattatttgatttgattttaaatactactaatattggatatccaagtgttgaaattgcaagtactgaggtttcttaatgtattactatatattgttatttgtttaatttttttttcatattttgtttaccatgtttataatattaataaataatattttatttatttgtttctttcagcaaatctggttacaacaaatttgattatagcaaaacttattgtaataaattaatttgtgagaaatagttgtaattcagactattataataaatattgttcaagaatcttttgttttaatttatattataagtttattttaaaatattatgttcatgatattaaatgaatcaattttactattttgatacatttgataatattatgtcaattgtattggatatttgaaagaatcattatataaaatagtagttctaagaaaaaaaatttaaatggataatccgttggtccaaaccgaactgaaccgtttatgaatgggttggtttaagttccaattttttttttgaaaatccaactgaatcaaaccaatcaaatttgattgagttatgttctaaatttgacaaaaaccaatttgaaccgatttgcgaacacccttacttttccctccttttatatatatatatatatatttttttttcttctaaatttaagagagacatgcttccccattaatatataatgacgataagcgaatttgatgtccacgtttttttttaaagtacgtaattgcatgcataaccaatcaacccctcttgcctatttttttattcaatcccatttgctctctaaaccacctactccttcttttttttaactctcatgtcaaaataactattttaaactttattaaaaactaaaatttttcataaaaagttaagtttaacatttttaaaagatttggttagtcagcacgcacgatgtgtgttccacccaataataaataaaaaaaagcttaatccagttaaatacaagtaaaactaactaattttttacattaattgagaaaatgggttaccaaaaagaaaatgggttaatattattatatcacatttaaaattataaactttgatataaaaattaaaaaagaataattgaaaatagaatctcaaatctcaataaataaaagagtattttttatataataccgttaaataattaaaatttacttatatatagatttatcaaactttttgttttgttatttataactaagctcggagggagtataatttattatgattatgtagaagaacaatcaagtaacctacatatatggtacttagccaaaaagttgttgaccacatatatacttagtaattgcggcgggctgtggtcaacaatacgatagctcacacttccatggaacagttttgtctcgttcctcactcactttggtaagaaagtcacagttcctcactcactttggcaacaaagtcacaaagtgtttgtcccattcttttgatataattgatgttatgacgattctgataatacactcatcattttgtcactatgcaacttattttattattttcattttttcctgtttctttgggtctgatatatacctcgtgacttttttttacttttctcccaaccttttcttgttccattttgcttcatcgtattccacccacctcggaggcccaagccaaaggttctcccacttagtacatggttttgatgccaatttgtttgctgtcgtgtattacgtatttgatcataatttttttgttatactaattgattatgaacatgattaactctgttttgtagtctttatttacggctcctttcatttttcgtactcaatgattgcaattcatcgtttggggtactgtttgaggtttaaacgttttgaaagtttggatccttaatctactggttttgcttccatcatggatgtcttcagaatctggtccttgatcactagttagaatttgagtggggtaaattagaactgttccggtttgtggaattgctcatcaatatcacattcccgtaagtttggatctgtttcttctaaagtcaacacttcctttataggataaagcaagtaattttacttgttgatgaaaaaatcacctgtcaatattatatgtgtacatacgtaacaaatcatgaaactgaagttttgataagaaaatttcagaagatcctgctttcatgtagtggggactgatgaatctttcatttgacatggaacggtaaccagcatgcttttagttgaaataccatttggggacaccaaaaagactaagttttctgcttttagttgtcacgttgacaggattctaactagcatgctttgtagtgttctaagtttttctgcttttagttgtcacgttgacaggattctgactagcatgctttgtagtgttctgaaatcagccagtgaacttgagatatattcattcttgcatttattgatattgcatagcatctttgcattggaatgcatctgatataatatcatgttatttaatcacactatatttcaaactctatttcagcagatcctgcggacattgtaagtaaatcttatggagatggagatgataactaatgttaccgagtatgaggctattgcaaaggaaaaattgccaaagatggtttatgactactatgcatcaggggcagaggatcagtggactttgaaagagaaccgaaatgcgttctcaaggattttgtaatatacttttctcaggaattaggacctccatttatctgttctagccctctagaaacttttcattcaaaatctaagctttcttttcctttgatttactaaggacacattaggattccctgggtgatgggattgcaacttgtgcttcgtttaattaattttcatcttttttgttctgaagcccttctctcaatatctatttggtttacttcaaacaggttccgcccgcgtattcttgttgatgtaagcaagatagacttgactacaactgtattgggcttcaaaatatctatgcctatcatgattgctccaacagccatgcaaaagatggctcaccctgaaggtatgtgatcagattctttggtctgtgccacattaatatattgccattacattcggtgcatgtttggattaaagtttacaaacttaagtgaatgaaatttaattttgtaaattatgcaaaagcaactttttctttacttctttttcaaactgagtttcagtttacaatcaaatacaactgagaatcaaacaaaatgttttttctgttttactttttgagtgaaatttttgaaggcaagccctgctataacggtaaagttgtgctttggtgacttctttgtcatgagttcgaatctagaaacagtctctttacatatgcaagaataagactacatgtaatattcttttcccttaccttcgcataacaaggagcctctggacaatcggatacgtactttttgagcggaatttaaaagattcccaactgaaaactaagcataacttcagtcttttgttgttgttcttgtggttatatacaagtataacggcttcactctcctatggcaaaaagcactaggttacgcatttccacaccttgaggtggaatgattataggatgaggtatagaatgccataatatgtaacttcctagcatttaattgaatgagaagatattttgtggctctttgaaagatagcttatggagtatattatgctgaaaccggtataggttctgtatagtttagtgtgcgataagcacaagaacatgaaaggagatttaaaagaggtttgcttaattacgaagacaatagaacattcccttctaaacaaaaactgctattattctttcttaaataagattacaatcccatttgaagcaaatgaatttatcctaaaaatctcagtcaatttcatctaaccattttgggaagaaaattccagcaagttaagattgtctaaaatgttttacaaaatgtttgcaaattgcaatgaatatagtgttttatagagcagaatattgcggaatgctccaaccttgacatcgtttaactattgtggtggttatttcttgtataactacgaagtataaaattaatctgaattaaacataaattcttctgatttcgttaatgcataagtccctgattcttaatatatttttaatagaagtttattttttactacaacaacaattgataaaagcttctgaattaaaagaaattatgcaacttttatgcaggagaattagctactgctagagcagcatcagcagctggcacaatcatggtttggctttcactatatttgtcatgcactttggttttatttcgagatgaaaactatatttctttccttgtagtttattatttatttgactgtaatatgaaattttatatgcctacttaactacatgcatttgttatacttatttacgttccagcagattagattttataattttttataattttttttttgtcacagacactatcctcatgggctacttcgagtgttgaggaggttgcttcaacaggtcccgacattcgtttttttcaactttatgtgggtattttttcctcaattatgcaagcactactattaatatctcctcttatctaaaatcctcaacaatcttgtcttaatacctaatatgttactgttctcttcttctctcagatgcttaaagacagaaatgtggttgctcagcttgtgggaagagctgaaagagctggtttcaaggcaattgcccttactgtggacactccaattcttggtcgtagggaggctgatatcaaaaacaggttggcaaaccatttggaaatttcaatcggaacagcctttcaacaaaactttatatggttcatcatggttgaattgctaaatctcctactttaagatatttactactggctagtttgatgggggtattttacagatttacattgccaccaaacctcgttttgaagaattttgaaggattggatcttggaaagttggacaaggtgtgtgattacattgttattttctattatttggtttagaattttgaaataaatgttttttttttcttttttaggcttaaatatgtttttatctttaatatatagtcaaattttgcttatgatccttgataaattttttcttcacatctgttccttgatatttgaaaagttgttttagattcttacacttagttaagtgatgacgtgtctgtaaatattttataatgcgatttgtgacgactcaaaaactgtgttagtatttatttcaaaattaaattaaaaaagaatttttctctctcctattttatcattttttttgcctctctctcttcggccctcttttctttcttccttctgtcatgaatacatcaccatagttactgtcatgaaccccttgtgtctgttcctttcatgtttcgtcatctttgttcaatgcctttggagtggatgcttttgtagtgggttaatttaaaacttagacaagcataatttagaaattagtattattaacataaaatcaacaaatctcccaaaattaatcaatacattccaaattccaaatcacaaatccaattaatctctatagctcatagcaaattcagagcaacaacaattcgaaaataacaaaaaaaatcaaccgaaggacatcgttgacgttaatgactcaaagggtttagagaagcttatgtggtatgtgaagacataaatgtacgccaagatgatttttccacaatgattgtgaatgacattcacggcgagatcaaggtgggagaggaaggtgcgaagggagggattgtggtcaccgctggcaacccaatcggggatggcattgaagaaggcttgtccaagtaactcgtagtcgttgaagaataactactcgatgtcagtgacctccccgtcgacgtaatcaaaggtggcggtggaagagccgaaaatgagagagttgtgttcgcaataaactttcttttggtagtcttgctctgcggtggtgactttgaaggtggtgccgaagtgtttcagatttgaaagttaaagattgacaatggagagaaatgttccagatctgaaagtcaaaaacaaagagaaagttaaatttgattttgaaacaaatattggtgatttttgaaccgctacaaattgtattatcaaatatttaacagacacatcattatttaactgacgacagagatctaaaacaaaactttttaaatattagagagcaaatgcgaagaaaaaatttatcagggattaaacacaaaattcgactatatgttagagatcaaaagcatatttaaatcttttctttattggtcatattattattgttacttactatttgctctttgggattacattgcagactagtgactctggtcttgcctcttatgttgctggacaaactgatcggtcactcaactggaaggtgatatagatctttgacacatgcaatttcctattctgtgacactgaatgtggaagtaataatatggtaagtcttgtttcaggatatcaaatggcttcaatcaatcacttcattgccaattttaattaagggtgtacttactgctgaagatagtaagcctatcaaacagacgcactttgtttctttcctgtccttttatctctttaaaattgttttctcaatctttaatcttattccatatttaataatgtagcaaggatagccatacaagctggagctgctggaatcattgtttccaatcatggagctcggcaacttgactatgttccagcaactattatggctttggaagaggtagtggatcctaaccatttctagaaattttatattaattgaaatagaaacgaaccacttgctatcattctttatttgattttatttcataatgccttatacattgaaacttcaaagctgttatatttgactcattggaaagttttttagattgcctgcttccttactcataatcattgcattttcattttctttttaaatttttgggttcggttgaataatgtcatctttcaattcatttaacatattggaaatattggttgcttgacttaaataggtagttaaagctgcacaaggaaaaattccagtttttatggatggtggaattcgccgagggacagatgtttttaaagcactagctcttggagcagccggtgtattcgtaagtacatgaaagtttgatcaccatcatagaaaattaaactattgaatgctgaactttagtatatgtgtttgtttgccttatggcatgaaaatatgcttttgtatttcattgatttactactttttaattggaggcagatgatctaaaataatctgaatagccccacattcttgctatttatatctttgtctttcatctcaaatttcagattggtagacctgtggtgttctcattggccgctgatggtgaggctggtgtgagaaaagtacttcaaatgcttcgtgatgagtttgaattaactatggcactaagtggttgtcgttccctcaaggagataacccgtgaccatgttgtcacagagtgggatcacccaagattttctcccaaattataagacggcaagactcaaccttgttctatattttaaaaaaggagttttagaataacctttgttcttattccatgcttcagtagaaaactttgttgttacagcgagtgaggcattagtcatccattagtaattgctacttttttattagttgtacataataagtttctacttgaactcatttcattgcacttggtgctaagatttggtaaactctagaaacataattgccaacaaaatgtaggtttttcttggcaaaagattaagttttatgatcatttatctctcatttatgtgcgacaactttgatttgataagttgcttgatgtctttggattgaaaatgctcccaagaccatctcatttgatgtgatggttatcatggaatgaagaacaaaaacatcacatttgaatcaaaggatcttaagaccacatgacttggttctaaggtcaccttatactgtagggtgttcttaaatgtttggtaacccactctattatttatcatgaagggaagggagggagtaggagtgaatatgtaagaaaagaaaaggaaaaaaaggaaaaaggtgaaaaataagatgaaataaagattatttgattttagagaaattgagtgaaaattaattttttgagatcatttgatttattgttattatttaagaaaacatgaatgaggcatgtaggtgggcacatgtgtgtttcctttaaaacaaaaaggtattatgaaatcatattgattaaagcattgggcgggtggggaattttttttgttgggttccactaatgtttaaaaaatttctctttaattctacctatcaaacaactcagtcttccttactttttccctctatttccataataccaaacacactctacaagatatttctttacccaccttttgactctaacgtgttatatttgattgggaggaaagaaaatgaataaacgtgtaagaaaataaaaaagagtgaaaaaaatgaaataaaatagaaagaaaataaaaaaagtaagattgtttgatcgaaatgaaaaagagtaaaaaagagaagaagtattcgagataaagtatgtggttaggaaagtaaaggaaaaaaaaaggaaatttaatattaaatattaatgtattacctttatttttatgaaatctaatagttataataaataattaattttaattattagatattaagaaaataaataattaagataaagaataattattttaaaataattctctagagtaacttgatttctagttagatattattattattattattattaaaaaagtaagaatcaagggggaggggtctgaataagtaaaaaaggaagaggaagacataaccatatcgagagactagtttttttgaaaattgtgtcatttgatcgctttttatttcatttgagcaatgaaaattattgtcagtctcattgtttttttnnnnnnnnnnnnnnnnnnnnnnnnnnnnnnnnnnnnnnnnnnnnnnnnnnnnnnnnnnnnnnnnnnnnnnnnnnnnnnnnnnnnnnnnnnnnnnnnnnnnnnnnnnnnnnnnnnnnnnnnnnnnnnnnnnnnnnnnnnnnnnnnnnnnnnnnnnnnnnnnnnnnnnnnnnnnnnnnnnnnnnnnnnnnnnnnnnnnnnnnnnnnnnnnnnnnnnnnnnnnnnnnnnnnnnnnnnnnnnnnnnnnnnnnnnnnnnnnnnnnnnnnnnnnnnnnnnnnnnnnnnnnnnnnnnnnnnnnnnnnnnnnnnnnnnnnnnnnnnnnnnnnnnnnnnnnnnnnnnnnnnnnnnnnnnnnnnnnnnnnnnnnnnnnnnnnnnnnnnnnnnnnnnnnnnnnnnnnnnnnnnnnnnnnnnnnnnnnnnnnnnnnnnnnnnnnnnnnnnnnnnnnnnnnnnnnnnnnnnnnnnnnnnnnnnnnnnnnnnnnnnnnnnnnnnnnnnnnnnnnnnnnnnnnnnnnnnnnnnnnnnnnnnnnnnnnnnnnnnnnnnnnnnnnnnnnnnnnnnnnnnnnnnnnnnnnnnnnnnnnnnnnnnnnnnnnnnnnnnnnnnnnnnnnnnnnnnnnnnnnnnnnnnnnnnnnnnnnnnnnnnnnnattgtttttttttttttttttttatataacttttcccctctttcatcttaattcaactcttttcactttcattacactaggcccttgtaaatgcagaccaggagactttacaatgctaggagtagtagccaaccacgaacaaaatccatgatgaacccctagacctccatcaaaagaaaatacccaccacatattgtgtttggtactatgtcttgcaatgtatttatttagataataaaaaaaataacgtaaaaactaacaaagtacacagaagctttatatataacctttgaagcgacagaaaattaccaacacggacatagccaaagatatgaataaaccaaaattgtggtcatgagatcttccacgtgtaatccttctttgagaaccgtgatattgatccatccattcatcgtcaactcacttggatagttggataagatattgtccattttcacttgcctcacaagttaacaccaccaattccttaatttcctcattatctatagcttctccttaatttcaaaaccatctcgaataagacaaccttatcatcatgcatggcttagtaacttagaagacagaagcaagtttctattttattttcaatatatacttattattttcagacatagttttgacaagtgcctaactatatacgtggaatgtggaaggtataccacaatcttttgcaacttatttattaaatttttttagaactgtacaagtagagaagaaacatgattaaggtgtttaatttttttcccccaaaaaatgatatgtctaatctataaaaattaacttaaacaacatataacatggtagttgcaccattatagttactgtaaagaatgctgaacattaagtgatacatactgtagcactttgcccatgagataatgatcattgcactccagtttcagactttagcacgagaatttggatggtttatctaaatccaatggacgtaggttttcaactttatgtgaagttatgcagattgcagatcaagctcttaaaattgattttttcacacatacattcaacaaataacaaatatatacataaacatatatatgtccaatcaatatatataaaaacatacatatttcttatttacaatttaaattcggattgaggaactctaatttatactgtaattttttaattaatctttaaaaaaatttcttaaaaaacagttaagaatttgagttgagggacccaattcttaacttgattttaattttttttgaaaaattatagtgtaaatttagatttttttaatctgaatttataccgtgaataagaaatttgtatgtttatgtatatatttgttatttgttctatgtttgtgtgaaaaaatcgttaaaaattcgcttctgtttttgtttttctttctttcctttttgttacattggacataaacctttcagaccaaggaaaaagagacaaagaagggactaaagttataacttaaaacaaatggagcaatcagaatttcgaatacaccgaattctcaaaggaacacaacctcagttttaatctcttatttattttttgggtaaaaaatgcagttaagcttaaaaaaggtgtactcatcatcattttgttactatgcaatttctttattattttcctctcgtgtttctttggctctgttacatgatgtaacagacttacatgccttgtgactctttcacttttctccacactttttcttgttccttttgagcttaatcgtattcctcacttcggctgcttagcaatccaagcgcaaaggttctcaatttcaacttagtacctgattttaattccatgttatttgcagtatttgatcataattttttattattactaattgattatgaacacgattaactttgtcttttagtcttgattcacggttcctttcatttttgtacttaatgattgcaattgaccgttttgggtactgtttgaggtttacacagtttggaagtttggattttaaatctgctggattgttttccatcatgggtttcttctgaatctgatcctagctcacttaatttgaaagggtaaattgaactgatcctgttagaggaattgttcatcaagatcacataaagtaaaatgatccataaatttggatctgtttcctctaaagtgaacacttgctttattggataaagtaagtaattttacttgtggatgaaaatatcactggcagatattttgcatgctcggaaacaagttgagaatagaagaatcatgtttcagatgtagaagctataactattggtttcggaaaaccacatccaaatcatgaaaccaaacatgctaattatgtaaacatacataacaaatcatgaaagtggagtgttgatatgaaaatttaagaagatcctgatttcatgtggtgggggctgatgagtctttcatttgacaaaccctttttcaaaaaagacaactcttctattgttgttaattgaaataccattgagggacatcaaaagactacgtttttaagcttttagtggtcatgttgaccaagactgtgttttgaaaggattctaactagcatgttttatagggttttgaaatgagtcagtggacttcagaaatatccattcttgcacttattgacattgcgtagcatctttgcatttgatatgatttcatgttatttaataactatatacttgaaactcactttcagcagatcctgcagacaacataagaaaatcttatgaagatggatatgataactaatgttacccagtatgaggcaattgcaaaggaaaaattgccaaagatggtttatgacttctatgcatcaggggcagaggatcagtggagtttgaaagagaaccgaaatgcattctcaaggattctgtaatctacttttctcaggaactaggacctccatttatctgttctagccctctagaaacttttcattcaaaatctaagcttacctttcctttgatttaccaaggacacattaggattccctgtgtgatgagattgcaacttgtgcttcctttaattaatttttgacttttttattctgaagcccttctctcaatatctatttggtttacttcaaacaggttccagccgcgtattcttattgatgtaagcaagatagacttgactacaactgtaatgggcttcaaaatatcaatgcctatcatgattgctccaacagctatgcaaaagatggctcaccctgaaggtatgtgatcagactcattggtctgtgtcactttcagatattgccattacattcagtgcatgtttggattaaagtttacaaacttaaatctgaatgaactttattttgtaaattgagtatgcaaaaacaacttccctaagttctatttcaaactaagtttgaaggcaaaattatgattaaattcagttttaattgaatccaactggaaattaaacaacaagttttttcagttttacttttttagcagacattgaaagcctccaacctgaaaactaactataacttcagtcttttgttgttattgatcttgttgttttatataactacttcactgtaacaaaggcaaaaggcacataattatgcattcccataccttaaggtggaatgactataggataaggtatagaatgccctaatatgtagcttcttagcatttaattgaatgagaaggtatcttgtggctctttgaaagaaagcttacagagtatgtttatgctgaagcaggtataggttctgtatactttagtgtgctataatcactataacatgaaaggaggttttaaaagaggtttgcttaattacaaagacaacagaacattcgcttctcaacaaaaactactgttatcctttcttaaataagattacaatcccatatgaagcaaattaatttatcttaaaaatctcagccaatttcagataaccattttgcagagtaaattccagcatgttaagactgtctaaattgatttctaaaatgtttgaaatgaattgaagacgatatcaagaaaagtagtgttttcaaatgaaaccgaaaagggtttgggagcttctggaaattttatattactttttagtgttttatagagtagaatattgcacaatgctccaatcttgacgccatttaactatttccgttgttataattacaaattataaaattaattagaattaaacaaacactctgctaattttgttaatgcattaatccctgattttcaatattgtttttattgaagattatttcttactacaagaacaatttagaaaaatttcttaattaaaacaaattatgcaacttttgtgcaggagaattagctactgctagagcagcatcagcagctggcacaatcatggtttgactttcaccatatctgtcatgcattttggttttatttccagacaaaagttatatttgtttccttgtagttttattatttattgaaccgtatgcctactgaactgcatgcatttgttgtacttaattactttccagcagattagttttcataatttttgtgacagacactatcctcaactgctacttccagtgtcgaggaggttgcttcaacaggtcctggcattcgtttttttcaactttatgtgggtattttttcctcatttcttctttccatagttctcttttctgtgatgtgtattaaaagtctcgtctcccccatgaatacaaaacattttcttgacaatgaaacatttccaagcaacttagtatgaaacagaaaatcacttttatgaattatcaattatttttttgttgcacttttatgaatgttttaatgagtttggaaaactaaggcttgattcctgcatactgccacagggcaatgtattacttacattttttttccattgttttttgccagaaaagatcttaatagtttcacaaatattttcttttctttcctctgtgatttcctccacacttccttttaataataaaatgttattctcattgcttaagttatgcaagcataaatatgaatatatcctcttatctaaaattttcacaatcttgtgttagaacctaatatgttactgttattttcgtctctcaggtgttaaaagacagaaatgtggttgctcaggttgtgagaagagctgaaatagcaggtttcaaggcaattacccttactgtggacactccaattcttggtcgtagggaggctgatatcaaaaacaggttggcaaccatttggaaatttcaatcggaacagcatttcaacaaaactttatatggttcatcatggttgaattgataaatatcctactttaagatatttactactggctagtttgatggggtattttacagatttacattgacaccaaacctggttttgaagaattttgaagggttggatcttggaaagctggacaaggtgtgtgattacattgctacttttcattattggtatgaaattttgaaatcagacgagtttttccattattggtcatcttattgttataactgttgctattttctgtttgggattacattccagactagtgactcttttgctgcctcttatgctgctggactatatgatcggtcactcaactggaaggtgaaatacatatttcgcagatacaattttctaatcagcgacactgattgtggaagtaaatatgggaaatttgtttcaggatatcaaatggctccaaacaatcacttctttgccaattttattaaagggtgtacttactcctgaagatagtaagcctatcaaacagatgcactttgttgcttccctgtccattttatctttattcagattgttttctcaattttgaatctaacttcatatcctatgctaataatgtagcaatgatagccatacaagctggagctgctggaatcattgtttccaatcatggtgcttgccaacttgactacgtccctgcaactattatggctttggaagaggtactagatcctaatcatttctggattttttttaattaattgaaatagaaatgaatcacttctagtatcattctaggtagtggaactaaagtcttagtcattctttgttttattttagttaatcacgcattatgcattaaaacttaaaatctgttatattggaatcattgcaaaattcattttcattgtctgttaccttgtaattgttgcattttcatctttttaaatttttgtgtcctatttcaattcttttaagatattggaaatatcggttgcttgacttgaataggtggttaaagctgcgcaaggaagaattccagtttttctggatggcggaattcgccgagggacagatgtttttaaagcactagctcttggagcagccggtgtattcgtaagtacacaaaaatttgattaccattatagcaaattaaactgttgaatgctacttcagtatgtgtgtttgtttgccttattgaagcatatatgcattagaaaggtgtagttcctatgttctacagagaagcatatgatcctggatcttagaaatttccttggaatatgaatttccacaaatgccatggaaacttatggaatatgccaatatgcttttctatttcattggtttactagttttttttggaggcaggtgatctaaaataatctagttagtcccatattgctgctatttatatatttgcctttcatctcaaatttcagattggtagacctgtggtgttctcattggctgctgatggtgaggctggtgtgagaaaagtacttcaaatgcttcgtgatgagtttgaattaactatggcactaagtggttgtcgttcactcaaggagataactcgtgaccatgttctcacggagtgggatcgtgcaagattttctcccaagttataagatggcaggactccaccttgttcttctatattctaaaataggaggaattttagaataacctttgttcttatttcatgctttagtagaaatctttgttgttataccgagtcaggtgttagtcatccattagtaattgctacttctttattcactgtacaaaataagtttccacctgaactcatttcattgcacttggtgcgatttggtaaactctagaaacatgattgcctataaaatgtacttttttcttggccaaagattaagttttatgatcatcgatctcccatttaggtgcgacaactttgacttgataagttgcttgatgtcttaggattgaaaatgttccgaagaccatgtaaaagatgtgatggttatcatgagatggagaacaaaacacatttcgtacaaaagatgcctaagaaccacaagacactcagggctaaggtggtgctcttaaaatgtttggtacaccgctcttgaccaagtgagagtgatttaccttatcaccttttatctttaaccaagccatttgccacgtttttttttggccttcacatgaaaattgcatcctcttaaaagaacctgatgctttcttaattagccttactcaaaaatagctaaaagcaacctaccacactcaaaggcgtcttgtcattgcttttctaccccaaaaggaaccaattgattgtctcatctacaaacacaatacattttattttctcccaccttttgactctaaaccactgtaaatgcaaaccatgaaactttacaaagctaggagccaaccatgaacaaaagccatgatgaacacacacagacctccatcaaaagaaaatacccacaacatagtgttagatacaacatcttgtgcatttatgaagataaaacaaatcacatcaaaactaacgaaataaatcactgtaaatgcaaatcaacttcgacgcaacagaaaaccaacatgcaaatagccaagataggaaaaaaccaagtgtcatagcaagatcttccccgtgtgtcgtgcttctttgagaaccatgattgatccattatccatctgttcatcttcaagtaacttggataagagatttttcattttcacatgcatcacccattaacactccaacaactaatatattgaaaaagtcattaagatgatgtcacatcatcacttaattgattacaaattcaatacaaaacttttaatatatcaaaaagaatagagactcaggaacaataaaaaaaatttgagaaactcaaaacaaatattgaatatatatcatgcatctcaaaacatatttaaatctctaatctataattcttttctcctttcaaatccatcacgaaacaatgtgtcaaccttatcaagcatggtctagtaacttaggatgacagaagcaagttttttctttaaaaaaccaaaaatattcttacggtaaaaaaattcatctgtcttgctccaagcaagctttttctttttctgagatttagcaagtgggaagagaagatttgcatgggatagggtcttctttgaacaaaaataagccaaattattggtccttgtcgacgcatcaagtatgataccacttttcccaaatgcccagcaaaagttaccgtccttgagatcgaattctttgagcattgcaggcagagtgaccttagctctatcagtgcttcaagctttacctactacctagctacattatgcaaaacattgttacctaaatctgtttgccagtctttttgaagtcttaatcaccaactttgtgtggaatgggaatatttaccgtacatggcataccatttcttggaatctgtatgatgctaataaagctatgatcatgaaatcattccccagaaacctaatgggttcgtgttctaagagcaaagtaccattgtggaaataacattatttcccaatgtcagcaaaaggcaaatgtttggagaagcatttgaactgtttgggatgatgttaatggactgttccgttgcgaaatctatctggaatgttttgttgaactcacaaagacatagggatttctttgtaacagaccttaatagattgataaggaagaatatgactactaagaagcatgtgattcgagagtggcaagtgatatttagtgcagtgtgttttctaagaaaatctgggagcttgcactgttttgatggcagaactcagtgctatattgtctgctctgctcttgaattggcatggcagagaaggaactcggtggcagattggatggcttcacagggtcatagcttacctttgaggaaccttctatgattttgtagggatcaaattcccacctagagtttccttgtagttggcttaggccacccctttaaatcaaaaatgtatacttatcattttgtcactatgcaatttctttattattttccttttgtgtttctttggcttattgatatgctttctgacactttttctggttcctttttagcatcatcgtattcctcacctcggcagcgtgttttccctctcaatttagtatctgattttaatttcacgtgatttgcagtcgtgcgtaacatatttgatcataaatttttatcatactaattgattcaagactgtgttttgacaggattctaaccaacatgttttatatataattctaaaatgaatcagtgaacttcagatatattcatgcttccatttattgacatttcttagcatctttgcattggaatgcatttgatatgatttcgtggtatttaatcactacacttcaaactcactttcagcagatcctgcggacatcgtaagtaaatcttatgaacatggagatgatagctaatatgttatgacaaagccagtcaacactgacaaatttacatggtgttaatcctgttatggcctatcaaaaatgtaacatggaatagcaaggaagaaagaatggtgtgaagatatgatttaattaatcataatcttcaagttggagaattgttggaagcgaaatgcggaagtgcggaagtgcggatgtcccacattgctgggtcttcctttgagtttttactttgttgctataaaaggaaccttagtagtcccatgtttagcatctcaaacattttcttctcccttcttttatttactaggttaccaagagatataaattaatttcttcttttagattctcttcgtagatgttgtaatttttttcacttggttaaattttttccttgtccattgtaattttagatgctcttttctcatctctaattttagttgagttattatcttggtatccaacacgaagaacccataatgtattgtagttaattataacttgcattacacgaatctggccaaaatgttcaatcctaataagtaatgaaagctcggcttatatgtacaaatgatatatagctaggtagttcagttcctcaaatgctatcctcatattctccaagagttatgtttcgtttgcaaccatggttcccaaacgtcattttcaagagatatgtcactgtcactttgaaatagaaccaaagattcccatatgttcaaggttcacgaaaaatatactaccccaatccattggttggtttatggattttgggttagtgacactgacataatgatgcgattcagcacgtctttcttgtacttacaaatgcaatttcttttgtaatatcccaaatcatggaatctcttttaatgggtattgaaattcatatatacaatttaaatttggtatatatggtggaaagaagagagacggataaaaaatgaaagaaaaaaagatggagatgaaagcaaaaaaaagtgaatgtatgataatatttatattttttactattttataatataactatgaaaattaatgactgtccttaaaacaagcaataaaaaataaaaatataacatttaatattatgcatgtctttgttaaaaaacatcaatatatttaagacattaaaattgacctacatacaataaaaatttctgagtttgaacctaaaatttcatgtaaattatttcatatttttttgtttctcttttttttattatattgcttaacacatatggcactttatctttctctttttttcttcttctaaatttctctctctctctctttcttcttctatgtacactcaaaatgtaggtatgtgttcattttcctaatgctttttgtttaatttggaatagaaacatagtagaaagaaaataacagaataagaaggataaaaataaaagaaaaataagataaaaaaaaaagtattgtttgaatggttagaaataataagaaaatgagttgtggaaaaattagttctacatccacaagtttggatgattgaaaaagagtcataagaaataaataaattatatgataccatgatgaacctgtgatgaaaatacctccatcggaagaaaataaatacccacaacgtagccaaagatgaaaaaaaaaaaaaaaacaacagagagtgtcccgagattctctcntttttacatgcctcacaagttaacaaactccaccgatctctttcctcattatctatgataaataattttcctttaaacatcccgacacaacgagccaaccttatcaagcatgcatggttgagtaacttaggaagacaacagcaagttttttttttattaaaaaagtaaataattttttggtaaaaatattcgtctgtcatgctccaagcaaagcttttgtttttttttttctttctttctttctgtgatttaggtaagagaagacacatatatttgcatagttgcatgggatagggtattagggtcaaaagaatgctgaatattaaatgatggtagttgcatcattactagttacaaactaataacaaaactttttctatcagtactatttaacacaactatgtatttaaaactcaaatatgaaactattactagttaaccgaaataatattcatatccattcacttgtgttttaatctcattttattcaaaatctgattatttatattgaaactggtattcaggttgaacaacgaagagcctataatatattctagttatagggcttatagcttaattagtactaacgaatctagccatatcgttcaatcgatcctaatgagcaatggtcaatgaaagctaagcatatatgtacaaacaaatgataggtagttctgttcctcaaatgctatcctctttctgaaggtagtacgtcaaattaaagttgtgtttcatattattggagccttggttcccaaacgtcattttcaagagatgttccattttggaaccatggttccccattcatttattgtgtatggattttcgacaattgggaaaatatctatagattgctgagtaagaagaatggacaatgatattttaatgtagtagcatggtgcaattttaaaaaaacgttttattgctgtttgattacaaaggttctgcaagtctttcgcctacacttcttattaattgcttcctatataagtttccttattaaaaggattaatatattatttatacaattattttataatatttttttatcttatttttatttctttttattatatatatatatataacttatgaaaaattgtacaaattcataattaaaggtcacaaatcatggtatctctttttataataaaattatgaaaaaaagtattaacgaataccttggggcaagcaataaaaatccaaaactgttttttataaaaacttataacatttcatattatgaatatacctttgttataactgtacgtacactccaaaatataatgtatatatgttctcatttccctctnatacctttgttataactgtacgtacactccaaaatataatgtatatatgttctcatttccctctacatatacactttttcttgcggagcggaagatgtgatcgatttgaagcttctaaactcgaaagtacttatcagctcatttaaattactttttgtgtttcacatactacagataaaggaaacaagcaaggtatatatacgttcaaaggagagagaagtagtgggatgaaaagaatcgatcataagaaaatgataggaaaggaaagaaaagtgattacgaaattaaaagaatgaatactaaatatgtctattttaagtcaatataaaaaaattacttataaattattcttttataaatggcatatattttttttagtatttattcttttaaatttttaaaccgtaaataaaattaacattttgcacaataaaaggggaaaaacaaacaggccaggtcagtaacctgtgtatatatattcacattgcttctaattttgcacttgtgtatactttttccttgatgttttctttccttgtttatatatataaaaaaaattctttcatatatcacactgttagtgttacactaacgaccgattaaaatttattaaaaataataatttttgagttttacattatatttaatgtttttttcttcttattttataatttattaaaaagaatatgttgttaatatctctcttattttctatcatcaatactagcactatatattatcatgacaattttataatctagagttaatgttggagatgacagtgagacaaaatacacacatgtaatagctaattgttgttaggggtggataaacgtactcaggtccatgaattgatcacagaccaatattttttaagaattcatgattatacaagattgtgcgggtttggataacaggattcgtgggttggccctcaaatccacaaccaccagccaagttcaatccaattaatcctaaacacacaacacaacagcgctaaacactgcaaaacaaaaaacaaaacggcacaacagcgcctcactcccttcctctatgtcatttcttctcctcaatccctctaagtcgcacgccacacctcacggccacagccaccgcgacgctgacccgtttacccatccctccttgttgcccgttccgttagatagaaattcatacacttgagtacctgtttaaaaactacatttggatttatatatatatgtgtgtgtgtgtgtgtgactatgtgtatctataaatatccataaatacttccaaaaaagaataatcaacaaaactattttgtgagcttcaggcaaactgcaggcgcggcaaatatcactttgaattttttaattaaagaattaaaagatatcactttaattatttttccaattattagtagccacgtgcacacacccacacgtacatccactaaacatgtgcattggcacgtgtgtgctcacaaacatgagaaattaacttattccaaattaaattgtttatgtttaacttaaactttttagtataactctttgatttgaaaaatcaagttaaataaatcagttatacaaaatttcatataatttataaattatttcatattttcattaattaattttattttaaacatataatatatttttcaaaatataaaaaatattaactataagactatatacaactataaatattcaatttattcaaaatttaacacacacacatatatatatatatatatatatatatattattacatgctttaaaagcatatgaaaacacttacaataagttaatccctccttcatatgtgtgtagacactaaagatactctctatttgattaaaaaatatgttaagaaaaattagtattcatgatacacataatggaataaaaaacgaatctattttgggattaaaatatattagtgcaaaaatcaaatgaataggatataagctattggattataaagttcaatattatgaagactttatgtgtaaaaaatcaatatatgttatcaattcttttgataagtgaaattctaaagaataaattctctttatactttttaggtctaaaattaagcttgaacttttctagtttttgtttagtacattttgcttttatgtagatgtttttatttataatgttaaaaatatgtgaatttgggtcatttttcaaagaaaaaatgaaagattttatttaaaaataatttcatatctctttatctttataaaaataannnnnnnnnnnnnnnnnnnnnnnnnnnnnnnnnnnnnnnnnnnnnnnnnnnnnnnnnnnnnnnnnnnnnnnnnnnnnnnnnnnnnnnnnnnnnnnnnnnnnnnnnnnnnnnnnnnnnnnnnnnnnnnnnnnnnnnnnnnnnnnnnnnnnnnnnnnnnnnnnnnnnnnnnnnnnnnnnnnnnnnnnnnnnnnnnnnnnnnnnnnnnnnnnnnnnnnnnnnnnnnnnnnnnnnnnnnnnnnnnnnnnnnnnnnnnnnnnnnnnnnnnnnnnnnnnnnnnnnnnnnnnnnnnnnnnnnnnnnnnnnnnnnnnnnnnnnnnnnnnnnnnnnnnnnnnnnnnnnnnnnnnnnnnnnnnnnnnnnnnnnnnnnnnnnnnnnnnnnnnnnnnnnnnnnnnnnnnnnnnnnnnnnnnnnnnnnnnnnnnnnnnnnnnnnnnnnnnnnnnnnnnnnnnnnnnnnnnnnnnnnnnnnnnnnnnnnnnnnnnnnnnnnnnnnnnnnnnnnnnnnnnnnnnnnnnnnnnnnnnnnnnnnnnnnnnnnnnnnnnnnnnnnnnnnnnnnnnnnnnnnnnnnnnnnnnnnnnnnnnnnnnnnnnnnnnnnnnnnnnnnnnnnnnnnnnnnnnnnnnnnnnnnnnnnnnnnnnnnnnnnnnnnnnnnnnnnnnnnnnnnnnnnntgtccgaaattaaaacataataaataatttgttaattactatgataatttcctgtcaaatgctattatatttcttcttgagaaattactatttacatatcaaggtaatattaattgtaaaaaattttcaattgagtaagctcaatgataacattcacatgtacatcatctatatatgcattttaataaatgagatatattatttatccaataaagaccattatatatattgatctatccggattatcgatatcatattcacaataatcatacgattaaaaacaatttagattaaattataagagacttatttctcatttttataatcaatgataaaaaaatctttaattttaatcaaagacattatcaagttaactattttatcaaacaatataaaaatgataaaaaaataatattttatttattggaattagaattaattcgatcatgtattaaatcttagacatacattattattctcaacaaaatgtatgttcaagaattcatcggattaaagtgttctattttttggtatagataaactagataaagtgcttttttgtcatttgaaaaaagcccattagctaaatcttcaagcaccccctctccccaatacagtatacacaaacacgcgcataagaaaccatatatattaacgaataaattgtatgagtttcgatcatagccgcacttaatttacaagcccttgatccacaaactgtattgggcaaaaaggcatttcattcatccatagtcttgcaacaagctagccaattaacaaccaagccaaattaattttcatttgtttccccttgattttgatgatttaacttaattaattagctagtgatggtatggggatgtttcttggacacgatttttcctcttctggagaaacctctgcaatgatcttttcatggaaagtccagtgctggggctatacatgttataatgaggtgattgcagtaatattggcgaagatggttctgacccagttggtgtcatcacccttctctccgtctctttatttgcgagcattaatatggatctggcctggatgcaatatacatgaccccacttacaactctttttcataatccaaataattgacctaacgactcatgcaccatgtgaatattctgtgccttaattaaattaatatatagtgagactacgtggctactaactatcgactcatttattatttttctttatttataaagtactagtatgaaataattaaggtgacttgataaaaagaaaacctcgagaaaaacatgcaacaaaagtgccgatcggttctacagttgtgtctaatttttttaggtcaaataatgagtctttgctttgatagcgcgaaacttcttggaaccccaattctaactaagcagtcaaatagtcataaatacgaccttctaccttttatatctttcgttgtcttgtaccctaaatattaccaacttgtctgcaaagactttaccctagataaatatctttattctctctcagggtagtcaatattctattttgttacagtagttactcatcatattataaattgaatcaagtctaataaagtaattagtggtaatcataactctcagtatcatctgagatacagtaggaaactaagtcaaattatatactacagtcacaataatttggagagttttttatactattagtttttaaccaatcaaattatatgacatttttattaattatttatttttgtttttaaattagtcattgattataaaaattcttattattatttcttaaacataggttctataaaagtattgaaagtcactaaaaaaattagaattcaaatttctaaagttatttttaattatattttctaatttaaaaagttacaattttaaaaaataataatcaagaactaaaagattaatttgaaaaaaaatttaataaaaagataacatataatttgtttgactaaaaaattaacaatatcaaaatctcctaaattattagagactccatagaaactcttcagagatgatggatgatttccaatagtttaattaatttcggaaatgataattagacacctctttattttaaaaattctatgaatattatctcatattttcttctatatctttttatcacattcaatcatttattatatttttctttttcttttttctctatcacgggatgttaactagcacttgggtgtcgaagtataatttcccaatcatttacccctgtgaatgtcatgttaaaaaaaatgttatgtggtaatagatagataaaagctacgtactttttttttttttaaannnnnnnnnnttttttttgtttgctattggctgcactgattgtgagttatgaccaatgatgatggaattaactacatatgcattttatttttaggcatgaacttctcctttttgaggccctacgtgaaggtttggaagaagaaatggagagggatccttgtgtatgtgtcatgggcgaagatgtaggtcactatggaggatcctacaaggtgactaaaggccttgccacaaagtttggggaccttagagttttggacacacctattgctgagaactccttcacaggcatgggcattggggctgccatgactggtctgaggccagttgttgagggcatgaacatgggannnnnnnnnncctcaagatatacacattgttaaaaaaagaataaaaaaatttctctatctttaagatctcaaaataaaatctactactaaaaaaagatggaagagatcttgagaaatattcaattttactgacactatgagatctaccaaaaagtgatataagatttcaatttaggatctattactaaaaatactcttaaaatattaccattaaaattataaataaaataaaatagacaattataaattttcactaatgatagtagacaaggaagaatatacttgtataacccaaacaacaactgaataatgatcctagaagtatatatatcatctagctaattttaagaaattaaaataaaaaataaaatacattaaaacaatatcatactattctaataatatatcttaacttgtttattcagcaagttctttaaccatttaggtttcaagacgttttttaccttcctagttcctagactatcttaaaagacatccaacaaatgtaaacattttatccaaacccaaacactcttcattttctttctctctttttttaattatcaaatcacatcaccaattatatagattatttatctcttatttctttttatttttttcaaggtttctacacccaacaagtattccaagattaatttctaaaaaatataaagaaagagagcaccttaattttgaaaaataaataaataaattacatggttgataaacaaaaagagcagatatatgtatacctgaagctctgtgacatctgagacacaaatcttgccatcatagaaaatggtcagcggatgttgcagttgctgttgatggtgggggtcctgttgttgtgggctctcactcacttctgcttccatccttcattcaaaacacaaaagaaaaaactcagaaccatgaattaatccaaattaagtacaagctttgtgcaaattatatatatagacaaatatcagaactcacaaagtaaaaccttaattaaaaagaagagagagagaaaaccactcacatgggacgaagatcggagagggagggaggaaaaaggcgaagttccaagttgcaattcttcctcatcttctatattctttgagagaattgaattctgtgacagagagaaaagtaaagataacgtgtaaacaagtaccacaaaggaaaaaaaatggaggatggtagatgtacatatatacatatatgattgaagaatttggaaaagcacccacaaatgaaacacgtaaagcacaacaaaaaaaaaaaatcggcttcggctggtaaacagtgttaaagtatgtttgaatttaaattaaaaatgcggtgtgtgcaattttataccaattcaaaagataaaaataagttaaaaataaaaataaaaataatgatatttttataaatatacgtttaccttaaatatacgatttgcaaactgcaaccttttattcaaagcacacttagttgtaggcagcaaaagcaaaagcacgttggagttgtaatatttattattaattataatttgagcacatgtttcacggttttttaatatttgcgacacaaggcgacggcgtgatgagttgagataagtgacgaatgaatgtattgatgatggcattgctgcgtgcggtgggcaacaccacaagacgaaattgtttctcacgctcgctttcccatgaaacgacacgtgctttcggccaaaccatttatcaaatataacatttttagtgatagatgttgtttaaatattttaaatttaaagatttgatttttattagatctctaaaagataaagtaatataaagaatgagtttttatgaaaaaattatctgtatattgttaaaaaaaataataaatctaagatctcaaaatgagatatattattaaaaaaaataatagagatattgaaattttcaatcttacttgtcattatcagatctattaaaaagtgatttaagatctcaatttgaaatctaacattaaaaatgctcggtattatactgttaataattttttttatggatttttcaaatttttatattaattaattttttaaattttttaatcaatatcttaaaaatattatttagcaaaatttatatttatatttaaactaatttatatataattgacacttaatactatatattaagtttttctttttttnnnnnnnnnnnnnnnnnnnnnnnnnnnnnnnnnnnnnnnnnnnnnnnnnnnnnnnnnnnnnnnnnnnnnnnnnnnnnnnnnnnnnnnnnnnnnnnnnnnnnnnnnnnnnnnnnnnnnnnnnnnnnnnnnnnnnnnnnnnnnnnnnnnnnnnnnnnnnnnnnnnnnnnnnnnnnnnnnnnnnnnnnnnnnnnnnnnnnnnnnnnnnnnnnnnnnnnnnnnnnnnnnnnnnnnnnnnnnnnnnnnnnnnnnnnnnnnnnnnnnnnnnnnnnnnnnnnnnnnnnnnnnnnnnnnnnnnnnnnnnnnnnnnnnnnnnnnnnnnnnnnnnnnnnnnnnnnnnnnnnnnnnnnnnnnnnnnnnnnnnnnnnnnnnnnnnnnnnnnnnnnnnnnnnnnnnnnnnnnnnnnnnnnnnnnnnnnnnnnnnnnnnnnnnnnnnnnnnnnnnnnnnnnnnnnnnnnnnnnnnnnnnnnnnnnnnnnnnnnnnnnnnnnnnnnnnnnnnnnnnnnnnnnnnnnnnnnnnnnnnnnnnnnnnnnnnnnnnnnnnnnnnnnnnnnnnnnnnnnnnnnnnnnnnnnnnnnnnnnnnnnnnnnnnnnnnnnnnnnnnnnnnnnnnnnnnnnnnnnnnnnnnnnnnnnnnnnnnnnnnnnnnnnnnnnnnnnnnnnnnnnnnnnnnnnnnnnnnnnnnnnnnnnnnnnnnnnnnnnnnnnnnnnnnnnnnnnnnnnnnnnnnnnnnnnnnnnnnnnnnnnnnnnnnnnnnnnnnnnnnnnnnnnnnnnnnnnnnnnnnnnnnnnnnnnnnnnnnnnnnnnnnnnnnnnnnnnnnnnnnnnnnnnnnnnnnnnnnnnnnnnnnnnnnnnnnnnnnnnnnnnnnnnnnnnnnnnnnnnnnnnnnnnnnnnnnnnnnnnnnnnnnnnnnnnnnnnnnnnnnnnnnnnnnnnnnnnnnnnnnnnnnnnnnnnnnnnnnnnnnnnnnnnnnnnnnnnnnnnnnnnnnnnnnnnnnnnnnnnnnnnnnnnnnnnnnnnnnnnnnnnnnnnnnnnnnnnnnnnnnnnnnnnnnnnnnnnnnnnnnnnnnnnnnnnnnnnnnnnnnnnnnnnnnnnnnnnnnnnnnnnnnnnnnnnnnnnnnnnnnnnnnnnnnnnnnnnnnnnnnnnnnnnnnnnnnntttttaaatatatttcatctaacaaaaaattatccaatgattatttatatatagaattagattggggtctctttagaatgtgaactatgaatgtaataccaggtcttttagtaagtataaaaaaaaaatataagatcttttagtgcatacatgagcatgtgtaaggattatgtatttctattggctcgttctcattcataagattcttattgaatgatctaccacttttagtgattgagacattttcaagtttatatttttgcttattaaatctctcaaagactattaatatatagtcttatgagacaactcaagcgaacaatgtgactcatctttgtgaattttccccacacagaactctcatttgtatctttcatgttaaagaacctaatcaacatttttatcatcgatcttatgcaaaggtggcaaactgagctactcgacctaatactagttaagttgatgtgggttgtgggccatagtgagttttgctgttaaagcccaaattcattttggacctataaaatgaagtccaataccatatgcatcttcatggatatagatcataaactcatcatcaataatagaccacctttatctaatagacaatcttatgggaatctagttaactaaatcaataggttgtagaaccttaaccttagcaggaagaacaatcacattttcaacttgaggatatattctctcaattggaacatgtgcttcaaagggacaatagaagcaacattgttgttagtgctaaggtagccgcaaagaaacaatctcaattaaataagcattagccttatatgatgggatgacaagattcgctacattaagctccaagaatttagtgtgcatggacttcacaaccctagtgtccttgttaacacaaaatatcatatagcctttaccactttttagatatcacttggaaaaaaaaatgactagtcgatcattaggatttttaaactcctttggatattctactgacacttatagatgtgttgtcctctctcaacaggggcagacccaaactccaattagaggaggccaacaaaagaaaataaaattcgtactacaatatatattatcattttttatacaaaatattaataatttgtctctaattaaatcattaatctattatgaatactatagtgtatttatatatacaactagtcaattatatttattatatataaatttataatactaaaacctcaattataaagtataaaaattaaaaataattttctttcgtgcgatgccatgcattttagtcttgacctcttgttaatgtcataactctagtttccaaaatatgaaaattacattacaacaatttctgaccagtctaatgaaactggtttatgagattttaaaaacaataactcctttagttgcaagaaaaatagagtttaacaaaactcaagaaacataaaaatgactatataataactaaaatttgataaaatatttagataagatttcttttaaaaaaagataaaattattatttgttttatattttaaaaaataggagataacaattgattaaataataattaaaatttaataaaatacaatattcaactaagatttcttttaaaaaaataaaattactaatactattataattttgaaaaaattcaatagtaaaaactaaattccttccaacttccttactgccaccataaattatacgtataaaaaacaaattagcatctatagttaataattgcaatccctgcataatgcatggttaattatgtgcaacatttgtctaatcctaaatttctttaacatattgtaaccaattagttagctaacacaaatctcatcagtaaaatatatccttacattagaaaaaataaataaaaagtgaggggggctatggcccccaacccaattcatgggtccgcctccatctctcaataataatttcttcatatatttcctaatatgcatatgatatataaaagtatttaatttacccgaactatatttaattatataaactttttatttaatttaatgtataaacttatggttacaattttgaatgggctctctcctatactgtgtattgaaatagctacattaaggacattttaagtattcaatttaaagtaattaaggacattttaaatagctaataaattaaacttaacaatgaacgcttgaaaaaaaaaacattaaggacattttaaatagctgtttgatatataccgacactcttgatccgtatgataattattgtaagacaaatttataaaatacttggtttgaatgctggtaacatcccaaaaaaaatagttgtatggtcattttttctaacttttcctgttatttatcttcttattttttttaatctagagcatttcttgttatggaggtgaatatgaatgactcaacatacagatatatatttaagaaattaatattaaaatagttaaaaaaaaacacacaattatctgtaaagcgtattatacataatacatgttgttacggaacccggtcactacatgatcccgttttatgcttgtggagctaatagtgtttctattcagccccgagtagtatgaatcaaacagtagaaaggacaattacgatgagataaggttatcggaatattagctacggattcaaccaaatcgtcattaagtttttcactaatacaacaaattaaggccacgtttaatgggggcatgcatgactttacacattaccctgcacagggattatgcaacgggtctatatccatgtgctgtttatgtaacacgtgataattaaagttcattgcagttgtatttttttttttataatcatgccatagttaatttattaaaataagtacacttattgaaagatattgtaacagtaaaaaggtagacgtctgacaaattttaaattactagtatttatttaatagtaaagtaacaaattttttttcctgtgatattaccctagaaaataagtaaaaatgtgtgaaagaattgtgctaattaggaatgttataggttttttctgtgatatctccataaattagaagagaccaactaagctaacaatttgattctatatttgaatttaaaacatccaaagagaatcatcttgattttgtgacttgggtctttaatttcttaactaaaaattaatgttccgttgctcgaatcagttaactttgaacatattctcaaaatgtcactaaaagtaggattttattagtattttgttttttgctggtacaattcattaagtattttattgatcttgttctccaaaagattatataaattactgaagtaaaactacaatttcaattaaaaaaacacacacaaataattaacatctaatcaggatttgtatctaagttttgtcctacaacaaactgcaaaattaatgaactttctggcacgatgtctagccaacacaattttatgtttgtttaaaaggtttaacttttcttttggtggtataaaattggatagggatcttctcctgttagagttttaaaatcagatgtcctgttaaactaatctcaaggatggaaattaaaacacttgaaacttaccgtttcattaaccaattaaagcaatacccgagagagcttgaagtaccacggcattcactgttagggtgttctagcagggaagatatcaagtctgcagaatgggaattttcgaactgatgctgtcagaaatacccgagaatcactctctcctgttaacaaggtgtgataaaattctcatgttaacaagcacttttattaaagactaggtgtttctgttttaaatttttgcgaattgattttaaaatgttgaatatgattatgtacaaaaattaatttgaatcaaaatattatattaatatgtgtgttatgatgtatggaatttatttgaaataaaatcaaactcccgttttaaaaaatatcattgttaatgattagcatttcctaataaccattattattaaatttacttgacctgtacgataacttagaaaacaaaaagacttattttctggagttttaaatatgaaaatatcttatttgcaagggaagtagtgtgttattcagacgctacattgagagatggaaagcacaaacaaggggaacaaatgtgcagtaatgaccaaaagaaaaaataaataaaggcatgcaatgtgaggtcccatgccttataaggcccatgtttcctgcacctcatataattttgaggatattggtccccaaagtataattcaataataaattaatcctaaaagatgaaaaatataaattaaatttttaaacgtacaaaaattatgataaattaattattccattaaatttgtgagatattttttcattaagttataatattcaggattaatttgacaataaattatatttttggaccaatttaatattatgttataaagttttaggaactaatttattaataaattgtttgttgtactaatttgtttatgtatattcagaaattaaatttgaatttttcatcttgtaatgaccaatttgtggatgcctagtacttttgggacaaatttgattatttattcttttaattaaaactgaaaatttcaaaaatatccggtgccactttttcttcttatttgcacagcgtaatctcattttcttcgtgcaaaaataccctgtgacagccaccaccctagccacttttttgttcgtccatatatattcaagatttctcacatctcggcctcattatttgttgagatccggatcagagaatccgtaagtgtttgtgtttattccggactgtgcgttccgtaacatggaggtgcatgccgaaattggtgaggtgcaggaagcaacgaccccattctaaacggggttaagtccaattagacaaggaaaatgcatcatcgaccacaagaaagaggtggtggtgggggcgatggaaactatgctcacaagtgacagagtagaaccaaaagattttagtaataactaacataagaaactaggtgaacgtaactgcacagacacaactactacataaatcttccttaatttctccgcccacttccctcctataaataaatctttcatcctctctcttctcttcatttcatttccatctttcttgggtgatccaatggcgacccttttccagggattgggagttgtgaacccatcattgtcttcttccaactccaacaatttcctgcttccttctcgtacttccctctcaggtttgcttcttaaatttctttcctttttattttttccttcaaattgcttattgagattttagtttcattctgtgtgcgataattgattggttcagagaggaaagatagcatatttgtagtcagatctgatgcaagggtaagcagccaggttctgaaggctggagctcgtaagcatgaattgttggttactaatgcagttgcagtaagttatctcatgactctcattccattcccttccctttttttgcagtttggtttgggatcaatgttgtcatcatgtttgtaatttgtgtttcttggttgtttatagacaaaggaaggcagttctgcggcttctacttcaaaatctgggtatgtctctttttgtaatcacttgctagttgctttttgtatttccatgttattcaaatttaagcattttaatttttttttaatgtgagatgaagctatgctgatatgttcaggttgttttctcttttgctgattgattgacttgattttagttaaaaactgtaaaccaatggttatgtttcacttttcctaatttggtattgtctacaaacaattggcctatggttggatgggtactggaaatgacaatgcatttcaacataatagaatctgcatacctttgcaatttcatatttttccttattcattccaattaagcataggtttagagtgtgtttggtatactatacatgcaaatggaagcatggtaaagaggagaaagtcaaaacagtgaaacttagcctaaattcccgtatttatggatgagtgaatagtgtggggaactggctgccgcttcatcccatcatcagcacatctttaccctttgataaatgagataaaagtaggtccagattgtagttataatgtaattagtttatttagtttatgttctgatttgtttataaatgcttcttgaaagtacaaaatgatgctgcacaattttattcctttccctttatgctcttaattttgtgatgaataagaggacatattccatcagaaaacaatacggcactgaagcaaaagaacagacatgctctatagaattgactatacaaacctttccctgtatgccgtattactgaagacatcctattcctatgtgttaaaatatctagaggatttctcataatccatatcaaataggaaacaaatatgaaaaccactcgaaagagattatcctagatactttaagatattctatgataatgatgttatgagatgtatcctagatattgttacatgtttatgtcaaacctttcatgtgcttcacccagcaacataagcttttggggcaattacatgatatcaaaacttctttgcaagtgacgagtttgattcttttttctaagtataatttaattttcagtgcaaggtagggtggccagctttgaacaatatcattcacgtgttcttacccaatattttaagcttttggaatagttgtgtacttgtcactttacaattccttgtaaggcaacaactcgttgtcccatgatacccacaatacttcttattcttgctaagattagtaacaatatccatacaatgtttatctttgttcttaagagtcaagagtcttaccctttttctttcactataccaaatgtccataaaaggtaatcaaattataaggcgccacctctcagttgagagacaggttttgacttaccaaaactaggaactgacaaacaaaaataaaaagaaatgagatagacgaaaaaatagtctggactcccttatttaaggaccaaaacagataagaatgcaacaaaggattatattttagatagattaatggatgaacagcctcaaaaaaagattgtttgtgattggtggtcccttgatgtggtacttcaaaacttttgtgtagaaagccttaggaaaactccttgtagagtgtagaccaaggatcagattaccttgttacggtcaaaatttagggatgacaacttctttaggtctgaaagaatattgcagtaacaaaaaagagttaaggtgacgatggttgaaaactttcaggatgttatagtgacatgtaattcagagttgctaaaaaacatttttttttgtttgctattggctgcactgattgtgagttatgaccaatgatgatggaattaactacatatgcattttatttttaggcatgaacttctcctttttgaggccctacgtgaaggtttggaagaagaaatggagagggatccttgtgtatgtgtcatgggcgaagatgtaggtcactatggaggatcctacaaggtgactaaaggccttgccacaaagtttggggaccttagagttttggacacacctattgctgagaactccttcacaggcatgggcattggggctgccatgactggtctgaggccagttgttgagggcatgaacatgggatttctacttctggcatttaaccagatctctaacaattgtggcatgctccattacacatctggaggccagtttaagataccaattgtcatccgtggacctggtggagttgggcggcaacttggagcagagcactcgcagcgattggagtcatattttcagtcaatccctggaatccagatggtggcttgctcaaccccttacaatgccaagggcttgatgaaagctgcaatccggagtgagaaccctgtgattcttttcgagcatgttttgctttataatctcaaggagagaattccagatgaagagtatgtattgtcacttgaagaagctgagatggttaggcctggggaacatgttacaatattaacgtattccagaatgaggtatcatgtcatgcaagctgctaagacactggtgaacaaggggtatgaccctgaagtaattgatatcaggtctttgaaaccatttgatcttcacgcaattgggaactcggtgaagaagacacatcgtgtcctaattgtggaagagtgtatgaggacgggtggaattggtgctagtttgactgctgctattactgaaaatttccatgactatttggatgcccctatagtatgtttatcctctcaggatgtgccaactccttatgctggcacattggaggaatggacagtggttcaacctgctcaaattgtgactgcagttgagcagctctgcaagtgattgctacaaagcactagcaattaggatatggtttttggtaaagctattgtgcttgttaaattaagcttgaattttcatcatgattttctcttttccttttatttctgaagtctaaagcccataactttaaattgttctattttcgatttatcattgggttcatctaccaccgaccccaattaatttgggttaaaggtgctgttgatgttgatgttgatgttgatttagaactttagaactgccaacccaatccaaatctttctctgcttgttcatctgcatcatttgtgtggtgtgtgtaagagttaggcaaagccttataactagcgagatatttgtagtcagtgctgaactgctgaagccagcaaatatctgttacagattttgaatatgctattcaatcctagtgttaggcttctgagttctcgtgttctaattggaagttttcgtgtcagtttcatatatatagtttagttagtaatagccgtgggattgcactactgctaaatattcacctgcacggaacagctgaaatttttgtattcacctaatatctttgtaatttaatgcctatacattgtcagttagtcaatcacaaataaccgtttaaattactttaagataattattttaaacatcaataacttatcatacatgggattgtaaccggatgactgtaaaacttttacattgtcaatgcatattcttctttctcatatctttatgcatatttatcatcttgacgataacatttgaggaaatttggtatatgttattaagcttcaatttttcttactattgctgcaactactaacttttagcacttcatctggtatacgtgcatgagaattttatcgtccaatgtactaaattcctattacatagcagctcaatgctccccaccaatgacaaaataaaacaatcattgaagaacacgagttgtgttagaattaagggacttttctgtgaacatggtaatgtaattgtatgccaggttgtctcaaagcccatatgtttttggtattgactatagaccatagatattttctggtataaataattttgtttgaagcaggtagaactattatgaataacaaatttttttctgtgtatttaaagtggcttagaacccgaattggtgatctctaattaagctagaagatattgtatgtctgataacgttttgtgttttcttcgagaaggctattgaacttgacagcttttataggaatactgtaacaaaatgcgttgttgggttttgaaagtcattgatcattttgtaagtggagggtgaccgggggatccttccacattgagttacacgctttctctagttctctaattagttgtcaagtagggataacaatgggtatgatcccacggtatatgttttcatatccccattttaaacaaatctccatatttggtcacatatatgtgtggatactaattttaattttcatctccatacccgttatatatctataaacacattcgcattcacaacccgcattttagttatacataaagttaataaatcaataaaaaaaattagttaaaccaattactacaactaaattaaaaatacagtcttaaatttaaaaaatataacattaaaaacattcatacttaatattaaaaacaaacaagcatagattagtttaaattcaggttataaataagtaacattacaaagataatcatctaatatagtaattcttaaagttaatattctaataacttaacaaaaactctaattaaacttggatgttatgtagtgacagaaactctttaagatctgacaaaaaagaatatattgaaactaattaacttataatcatatactataaaatttatataaaaaacacaaatgaataagatatttgacctcatcatcataatcaacttctccatattttttcaaacatttatctcctaagtctatatattgctttggtccactaataacaatagaaactagaacattacaagaagacaagagattagactatcaaaacaataattaaaactatcaataaaagattagtcacaaataaatgaattagatttagagtttcactccactattctaaatctctattactatcagagtattagttacaaaattttaaaaaatacattattattttttcacaaaagatattatatatatatatatatatatatatatatatatatatgacatatgcaagacaagacgagatgagtattataatacctgcacccgcatccatacctgcataaatttgcgaataaatattcgtccctgtatacaatcacaatatgtggatagttatccttcacacttatggatatttttatggataattatcaatcagtaaagtggaaccttgaatcagaatcaagcttcaatgtttttgcctttcctttccttttgtagtataaaaaatttaaatataagacatgtgaaccaaaactatgaaaaccatttctaagaatgaggggaaagtacgtagatagttaactgtatattttgggaaatgtcttattgtatgtggcaattaattatttgactgaagtactgagagttggcccaactttgatgaggttttgttaccacttgttgctactttaattgaatatcagatcattagatttggaataataatctcatcaaacaattgttataacatagtagttagaaagaagccttggggtgtcaaagctatattttacttgaaaagtacctttgcaatgggcatcgttgaacaacgttatataaagagttaacatatcaattctttacgcacaaaagtttgaagcccatgttcagtccaagttctggaggcctacatggcctatgggctttgatatagatgatgcacttcaatgataagctatgtgattgtgatttgcgattgggaggtaattgaggaagagtaataattctttcttatgtagcctgagcctccatcaaaggatcaaaattaaatttttttttatctttaaaattttaattttgcttctagtattttactatgcatgtcttttaatgaaagctattacttatccttgggcttctaaaaagtggttcatcttattaaggtgtactatattatataatattaattagaatcatttttggataacatcattttatattaaattaaagaaatgatactgaaataatatgattttaaaatccgtgaaccatgcaatatagtttggtttagactgcacatcattttatgttaattccatttgtgattcctctcaaagttaaaaataaaaataaaaatagtattagtaaaattttacctgaatactgagtcgttttttttacataattcgcttagaaattgtcaaaatgatttaattccgtataaacactatatatataatggtgctttctattatgttgatctaggttaagtgagcctcaggcctagggtttatttatggcacacatgtacataacttattctgctctgctttcaataataataataatattcttattatcattattattattatattgacatgacaactgagattattattattattgtgattattttgggcaaaaagtgcctgaaactacagacttaaaaagcttcctgtgtgactagagcaatagtgacaactaagctgatgaggtttgattacaattaatgtttctaaacatttgtatgcagccacacaaattggttttcttttattttgtagtgcactttgagtcaaattcaaagggatatgtttttcttttactttttttttggtttaaaaaataaaaatcagcgtaaaaagaaggcaaataaatttgtacaaagaagaaaaaaaatatcctggaaattgtacgttattatatatattcttcatatcttctcctcctgtcggggtttctcttataaagaattggttttcttgtttctttggtggcactgatcgatcaatatatagtccttttattaattttttgacatccaacaaactgaattccaacacaaaagggaggacatgaaaataattctttttaacctacatgtgaaaagtacattgataaataatacattgcagcgaaaacctgagtctgaatcgagggcatggccgagacatgctgaaacatgttgtcgtggattttgtaaatgtgcatgcatgtggtctaaatataattggagcattgctggttattaaatatacaactgggccaaaataattaatatgcatgacacatcagggtcttggtggtctattaatcaactgaaatagtagttaatatcttgaagccaaagatggctacccttttccattttattggcaactgctttctgctaggtgggcattcaaatctaaccatgtggaaaaaatgatggaataatatcatgatgtgatttgagttgtagcagtataggtttggttttgatatgtctttttggataaatttttaatattcatattatcaatgaagcatcattttctggcaattgtgtgttccattctgggccacaagtatcgcttaacaggtaaatagtctcactccacaatatgatctttggagattctcgtcttggaattggaattcaatctcctcgcaaagaaacaaaaaggaattggatttgaatctagttacttagattacaaatgtttctataccgtggttttctgtggaattcatgttctgaattctccaagtggaatttcccccccttctttttttaaaagcatttgcacaactaggctaaaactgaagtaaaatatatagcattgtgatatgcaatatctatcagtaggtgcagaatattaaatactcaaaaaaaaaaaatggatcaaatttcatttaattttcgcggctccaaacatgcttcatgatgtgtttaggtccatgaccacattcaccaccatattaaaagaatctgcttatcaagcatttattcagttacatgcgtagaatgacatgctggcgcgggcagcaacagaatttcgacctagatctttgtaggtaacttttcctaacgttattatatatgtagccaagcgagttaaggaaaatatataataagaaaggtgagacaaagttaatctaataaattttggccacacaatcatacatgaatagtgaaaatcatttcctccctctctcaatatatatgtatttagtgagaaaacttttttttatgagaatgaaaaaaataatattaattattaagttttatcatgaatttgacaaaattaaatatttaacttttctaattgattatctgatttcctttttgaaaattttatcatttatatatattctcattttaaaattatacgagaactataaactaagtcatacaaccataatggttatgataattaaaatgtactagtaattagtactcacataactatttaaaacagttaagtagtgtagttatcttttaatctcgatattttgagtgttagtgaaacgggattatatgcgttcctattgatctgcccaatttttttataggaacaatttttgtgaatccaacccaatttaattaagacatgataaatatgagattagactacgtgtttggcatcatatattaatcttaacggtatatatagttaaattataaaattaaagaagtatagattacaatatatattttatgataaataatatcaatataaatataacattattttagacaaatataatttattaagttaagaagatatataattaatacataattattttaaaaaatatattcttaaaaagaatatatgacatatacattgagttgggacgtcccaaaataaaagtcgaactctcgtccttaaaatacattaggtctaatttcttatattcgaaatcatcaaaagttccttctaactaatttgaatcattaacaccttcatcttgataattaaaatataatctaataatttttatctattgttttttctcacattaacaagatttttcactcgatatgttctctaaattaatcttaattaacgagggtgtgtgggcttagaacccctccctgcttggctttgaacttctcttataatgagctcgtaaatggttatgttcttaaaaatcttgagtttagtcattaagcggaattagataaattggtgcaactattcacttcacatatgcaacataatgtatcttgctcatcaatcatcttcactatatgaagttatcatgaaatagttttgcacgtgccttctaatagcaagggtaatgatacagtgttgttgattcgcaaaagttaacacgcgttactagatttatcatgtacgtaactttcatataaaataataatgaaattaacggcttccaacataaaatcctttcagatatgatttgtctcccttcttgtcctagtgcggctcgaaagttaatcagtctcttcatgtggaaaacatgtgtggttctatctaacattcatgttgatgcattatcatttctcaagcaaattatcaaaatccggtctttcattgtttcatataacttccatttactcatggtgtaacaccccggacgtgttatcattaataatatcataagtgcgctatcagcgttatctaaatgcggtgcggaagcgatagaatcgattttcttgattacattatgcatggaatataaaacataacacaaagcatcataaacaagcctctgaggatccagttaactcaaacataaaacaacataggcagagaacatataagtctaaacagagataatcaggaggaaacataattcatacatatacatagcctgtacatatacatacaactcatagttctaccacatctgtggttatacaacataaatatgtacagataacgggtgtacgctcacaccctatactatacagaatacaagacagagataaaaataaaagctcttctaatcttcatctgcagcccatgatcactccagcaccctcagctagggcctcctgccctgtagtaacttctctcctctagaagtacctgaaaaccacaaactccacacagggtgagacagacatctcagtaaactcagggttttgggagatcctctctttccctggtccacccccacgcacacacacaaacagataacagagctaaggacaccatcccagctcacaacataaagcctaggaccttagcctagctttcacacaatcccagctgtctgggtcatcaactgatgatctcagcatcagaggtatcccacctcatactggctctcaagccatctcagactagtctcacaaaggtacataacataagtgtcaaccactagacacttctcataccagagaggcaccgcctcctgaaccatataaaccatgcctgaggactctcactcaggactttactcatccagatatggcttatctaagaggctctaggctctcatcccctcgggaagccctctcttagagatgcaacatatctgtctgttgcctggcctctccaggactttcataacacatgcctgggcaagaacatccatatgggcaatcaactccaggactttcacagcacatgcctgagagagatcatctcacaacggaggcactcgatcactcaggacttcatatcacatgcctgagagagatcatctcacacaggaggcactcgatcccttaggactttccactgcctgtgagagactatccactcagggagctttcaatcccacaggacttccaatcacggtctgagagagactatccactccgggagctctcaatccctcagactatcaagccgccacctgagagagactatccacacagggagctctcaatccctcaggactttaacatacactggcctgggaaagaacctcctttacagggcaatcacatccaggacttatcaacatcatggcctaaggaggaacatccatatagggcaatccatccttaggactttaggcggagagcagtggcacctcccatggaatctcagctattccaaggagtcctcaaactcttcctctggctagggaacctcaactagcccgatactagtctagtatcctgtagattccatcactgaccatctcatgatcttcatctcaatcacagaaaactctcacagtgttcatcaatctcgaggcccaaggccccacacctgaaccacaggtgtcaaaacaccctcacaccatctcggtgtctatcctagggttcatcatatattcatatatctcaaacggtctgagtatcccaccaagatccgttcatctagcccttcgggcttcaattacatactaatatcaataacaggccttattggcctttcattctacagcatgcatataacatatataatctaacatagcatgcatcaatcacccgcttgagtggcaaacaagaaaaatggactgatccccagagcgatgagcttacctgatagttgtgcctgcaacaccaacctctgaaacaatggtctgctcctctgacacctcgtgtcaagccctatcaaggcaaccaaatgcatatcacagaccattcaagcacagaataactataagctcatcaggcagtccttaactgtctcagagaaaggaacctcggtccttatcatcaacccaagttatctaacttaaggtttctcaggctcatcctctacaagcctttccatagaccctcaatggtctattacagatcaccacagactcaacacaagccaacaacagtgagcatcaaagctctctcaacccacactctcagggtttctcagagcttggacggtctatctcgccagacaccgtctccatggcctatcaggcatctcaagcccatcacaaaggctcttgcatgtctcaaatcaagtgactcagtccaagtcacacaagcacaacctagagccaaaaccaacattcgccaaatcacaaactgaaagctaatcctttctcctctcatcaatctaaacacttctctcaactagaccaagagctaattctagttctatcacatatgggtcactattcacaggaaacccccaaatccaaaatcaatcggagaaactcgagtttcttacctcagaactgatgaggaaggcctctgtgctactctccctagccttggtgccgtggaaacaccgccgttcctcgtccaactcgagctctacaacctctttctgagaaagggcttttttggggtttcaaggagaatggaagaaggattttagctaaaacttggtttatgagagttttgataggcttaggaaatgttttgggccataaaacatagtcatggaagcttgggaacctcagccatggaggttgggacgctggaggaagaaggataagagagaaatgctaagattttcgcgttttgggccttttataggctcagacgtgactcccacgcctccagcgtgggctggcagagaaataacatttctgggctgcttcccacgccccaggcgtggactccacgccccaagcgtgagactccagaggaaattgattttctgagttgtttcccacgtccctggcgtggacccccacgccccaagcgtggaacctcagaaaaccaaaaaaataaaactttaaacgcatggttataacacatggtgcccattgctccaatgtggttctgatgacttgtcgttttcaaaatgtaatcaaagcaattcgattggtcttatcatgcattcatgcgtagacagattttgagtatatttgacacattcaaatgaaatacaaaaagaaagtgcaacattaagagctcattactcatcagatttagtttgcaggttaaccaaccagttcatagacttgaacagtttacttaaaaaatatattattatacactatgtcctttcctttttaaccgtctttgtcttttaaaattgttatgtaaaaatcaagaaatgtaataaatcacttacaagtggttatatgcataaatcactcagcagaaaatagccgatcctatccaacaaattgttctgggtctgtctacagctaggtaatatagtttcttgtctctatttttttaaaaataaaaaatggcaaaaaaagttggtaatcgttactatcggtatatgatattattcaagcatcggtaacaataagtctctagaagcatgcttcagacaaatctcaacgattttggctgcctagctagctttgcatcatgtggaagatttatggaatcatatcgcaagctggctttagatatttggataattaaattaatatatatattctgttccttgttacactcatcaactagagttaccatgtgctagctactttaattccctttgtcaatgaatctctgctaattggattcacaaattatccttagacaaaattgtcttttaagaaatttgtcatgaaaaaaacatggggtgtctaatactctaatttatgtctgatatcatggagtatctttctgtctaacaagctgtataccgaaatttataggatcagcacaggttctaaaaatatatatagggttagatgattaattaattaatatatactagttattttgtgccttgggggtaataactaaattcgttaaaaagtctacaacttcagtttatatttttttcccgtgtaaaaccaatggttgctcatggggaccattagttgtgtctgtgcatcacatggaaggcactgcacgggcatgttacactgggaaactatagttgatgcattgaaaggaacccgcaaccatctatgttttgatatagttgtgatcgatgactatttccttggtcgtgggatacacataattgaaatgttggctcttccaaagatagctagattgagtaccgtcaattgatatcattgtatttatttgtttgttttttggatataagcacaagaaaatggggaaattttgttgatgaaaaggataaacatgatatgacaaccaaacataagcgacgtgaaaacattggatggtgacccttgggagaaaggctcatcctgcaaattctaatcatcatatgcatgatttaagtaaaatatacctaacatgttaggaagcatgcaatccatagaaaggcttaattattcccatgatcattaaatagacttaacacagttgggaaatgcattaattttgagaaataactattttttaaaagatttttaagaaaataaacaaaatagtttttaaataaattataccaagaataaaacaagtttatttggcactttcttttacataatatctttccataatttttttccataatcatcactggtctctgaatacggcaaaatgttgaaaccaaaattcttatcaataggtatttttcattcacataaattttaaaattaaaccaataccctacgctcaaagaattaaaatacattttactcaggacaatatatatatatataaatatatatatatatatcagtagtcttaatcttaatattactttagttaattagctagggtggttgtagagaacaaatttaaattacatggactctgggtgaacttaagagccaactacttataaacacattaatgtaaaacatttaattaatgtaaaacatttaataacaggttgcatggagccaaccaaatttaattctacattccattagactgtggctcaacctttctttgatcgaagaggcaaactagctaacttcatgattgctgagatcgaatgcctgcctcctttctttacctaaatttttgtatgcaattaggtcatcctcagttgtcattcggcaattagctacatatccttgactcccactttacaggaacatttgagcttcaacacactacaactttctcttgtactttttatttatatttgttggatcagcaacgtaagatgagatatggtgcttacattagagaattactgtcatatgtgtttctcactatatatgaacgctggcgacctcgtaaataacatgtctcttatatgtttttattcaatcaggatatatattttgataattctaaaaaaaatgtattttttgagagagtatatggtgtcattttttttataaattagacttttttttttttactttaatattttagtaatgaagtataaggtatgaaccaacttgtgcattttgacctaccgtttcataagctaannnnnnnnnnnnnnagtacaaagaatactctaatccttaaaaaaaaaaaaaaaacactatctttcagccaatagaagacatgatacattgaattggacagctagctacaccatgcatgtagaaaaataaagtctaggaatttcaaattagcaaataaaacctaaccttaatcaagtaaaaaatgtaaacaaaatcaataaaacaatctctttaaaaaatacattaattctcaacaacaaaaggctcaaaactgtagaatgctagaacaccacaccatccaatcctttctttctttttttctttttcttttctttaccttagttagaacctctaaataatcctctatatgttgattaatataatattcatcaggggcactggctatactttgtatgtggacctatatatttgatttttaattcaagatcgcttaaccgtagcaagagcacgaaaaattgagctttcttatatactttgtatctggacctatttgattttaacttgatcccacgaacatatggttttaattttggtttatactcattattattagttttataaattaacctttattatgaagggtaattaattacgctgaatgtactgcatacgaattgcataaatgatagtatacgtgtatatctaaactgcaggacacgtgcatgttatgtgcaatgtccgcttgttttcactctccaaagcacgggactatcggttctgcaacgtagcaaaggcaaaatcctgccagctacgagctaataaacgtttgcatgcatgcaagtgaattaccaatgggctgaatttaaaacgttacttgaacacactagagtacaacaccgtttacttcaggattttttttttcaagaagttaaaaaaaatagtaatggaattatgtttaattagctttaattaatattatatttattggaaattaagccagaatattttctttacaaataattttggaggcatcgtttctgaaaataatggcacaaaatattttcagtaatggatttctcttcttgttccttcattatttagttccgtttctttttcctgtcaagtatatcctccaatatcctttaaatttgcctttcaaatcaacttacccttcaaccaggttttcttgcatacagtgcgttccgatcttgaaccgtccccaagaatatcggttggaaaattatgtatgggacactattatatactagtcgatatttaatgacaagaaaagaaaagataggaaagtgtgataaatgttactactataatttagaaaaaatatagatattaataaatgttataatgttaaaatgttcacatatatagtagtaattatccatttcggtttcagtttaagttactttttgctaatggcagttgactcttcaataaatctattgactcaaagtatgtgtcattttgtataatcatttgtcagttaaagtggaacaactataacatcttataaaggatgtatttggtttaaaaaataaaaatgaaaaagataaatttgaattaaaataaaatgtaaaagatgtggatttcataaataaataaaaaaaaactatttttcttcaatatttaggagactttcaattttcttcaccgcagggaagcctctagaacattccgtagtggatgatgacacaagcatgagaaagcggtgccatatatttatatattttagaaatagaaaataggaagtaatcaaatatttttaaataaatttaatttaaaaatatattaacagtgtaaaaaacataatatcgaaaatgataaacataaattaaaggtgttggaaacaccaggaaaattaatgtgactaaacttaagggcatataatagaatgcaagaagctggataactgtgacgactgtgccaaagatgaagggatgatgtggataattaagatgagaatgatttaggtgatgaaaaaggtggtagttcattagttcgtagacattatcatcatttagctatgcaacagaatcatcccgtgtaaatatattcctgtactctatgaaaaaataagattgtcgacacaaccaaacatatcatcataatgtgtcttatccttaataactaatatataagtatcctcctatctcaaactcataactgataggtaactatttatctcactaactcatgtacaccaatattataaataagagggatacagcaggtaacggtatcttctaactatataaattatttatttattaacttaagcgttagaggaattttacaaataccacatggctaggagcagcttagctgttacaccttggtggaagtgctttaactcaaaatgttaaaaaaaataaaatataatgaaaaattataagactgacgtaattgaaaatttcaaacaaatttttatgtgaccccaataccacattggacaagatatttacccgttaagccaacttccttggcatataatattattttacaccagttaattatctaaaccctataacaaattttgtttcttatgcatgtataaccaatgggataaagcacttaatgggatggatgagactttattataattactaatattatttgaccgaccagagtgtgcaacttttggacattctttttagttaatataatccttggtgtttcgtcaatgccccttaatccaaggtacatataatatttacaaagttatgcattgacttcagagtttaatgtgttaatgatataaaataattttatattattatttaattataaattattgttaatatgatttacaagataattttattagagttaataaatttatcatgaataattatttttttattaattgatagcgtaaaataattttatattattaattattaatctttttatcttgatatagaaaataaattatttattaactatttaactagtcgaggacacttttcttctaattatccttagaagaaaatattaaagttaaaaatcagcctagctaccaaccattggacgtgtgatatgtctttttggacaattaattttaaaagtatttttaaatctattatatagaaatcaatctaaaatgtcgtattactaaaatctcatcatcttacatatcacatccattgtctactatccgatataagtttctaaagtaaaaaacgtttttttaagaagtgttggtgtatataattaagataaaactgaataagataaaactttagattaacgtggtaagtgagaacaaaggcagtagcatagcatcccatcaaaatcaacttgtctcggaaaggatcaaggaaaagcacaagaataacaatgagtgaaaatttggctttttggggtccatcattgaagaggtcttttaggcagcattagaagaaaatacgactttctttgactacaaacctacgataaaggcaagtgggacttcttgtccccattgtcttctgtcattagacatgtaactttcaatgtcttaataaaccttttgcaaagttatggccaatattgcttcttcggcaaaatgaataataagtttattttaattataatagaatagatgtaacaaataatattattaatactacattgtcaccattttcctcttgcttctgcagcatatatgctctctaattattgtcagaaagagtcacgttttgatgcgttttttttctttttttctttttccattttcttacaaacattttgatgctattgaaacacgaactttttgtgtggtaaagatcacgcttaaagggagggaatcttgacaaataaaatttacctaattcaaacaagcagacaaacaatatttaagactttgtggttttgtaactttctccaaatacgtactagcatatggaagaaattggaaaatgatatgcagaaagcattggtaaaatttttcttattaattaatccagtgaagataattaaaataatcaaagtaatgtagggtttgctggtgtttgtttttctttcatggaagagatatgatattttaacttttttaggacactttagttttagacgaaacatcaactacaatagaaggatgaagacagaagaaggaaaatgtgagagcaaagttataataaagaagtgtagtttgagggtattaaaattttaggggatggcattaaaaatggagatgcaggaaacaattgtctcgatgacctctaaaatgaaattcaagtctaataaaagtctaatttttaaagcttttgatggattttgcaagctaaacctgtatcggactattttttaatcttaattttatnnnnnnnnnnnnnnnnnnnnnnnnnnnnnnnnnnnnnnnnnnnnnnnnnnnnnatatatatatatatatatatatatatatatatatatatatatattaaatccctagtttaaatgttgttcctttatttcctgaatttaatgaaatggaaaaatggtccttcaatttgtaacctgttttgtcaagttagtcattctgttaagtattatgttttaactttaacaaaacatcatattacaatccacgtgtgttaggactattttgaagagtttaagggttagatgggaaaagttgtaaaccatcatgttagtctttgaattttttttggtctcttcttttatgaaacccttctttatttcttacgtgtttaagggaaggttaagtcacaatcttagtaatatttcttagcgcatccacattggaacaacttataatagttacttccaatgagacccgtgtatacatattatttatttttattttttctaatacaagtaactttaaataacaaatttttacagtgaagtaattctctttagttcttctaatgggttccactaataatacatttatttcaaggtaatgttttatgagtgacaagcaacttaaaataattatatatatatatatatatttttattttattaatttaataatgtaaagcaatgttgctttagctagcaattgtaccaaggaagcaacccgtccgtacgcgactacaaaggtagttgcttttgtagcaatattgctttcagtatcctatcacttcccaaccatgtgatggccttagttttatgatacaatgtcaacatgtgatatttttttaagaaattctaaattcctcaaataatttttatttatttggcttaaaatgaactttaggggacaaaaatatagtatgatttcaatatttggagtgtttatgatacaatgtcaacatgtgatatttttttaagaaattctaaattcctcaaataaattttatttatttgccttaaaatgaactttaggggacaaaaatatagtatgatttcaatatttggagtgtttatgatacaatgccaacatgtgatatttttttaagaaattctaaattcctcaaataaactttatttatttgccttaaaatgaactttaggggacaaaaatatagtatgatttcaacatttggaggggattaaaatcaaggaaaaatgtcttacaaggtctaaaatcaaaattgataaaaaataatttttaattttataagatgaaaaacaatgaaaacattttataggaaccaagatcaaaactcactttttataaagattaaaaatatatttaataaagtggtggtaaaattgagttgaatatactaatattaaatattaatagaaaaattaaccttacagtgcgtgacgtaaattggtccccgtctagtgatgtaatcacgtagcttaacacgtgggctaccaggttttgaccaccgtatagttcatattcataggttagattttcaagttaacaaatcgcaaattcgcaataatccatatgattaatttagtagtaatccagtatcagttttaaaataagtgtcaaaccaatcttttaagtaattggataatcatacactgccacagtaccacttaagaagagcataaaaggaaacgaaactaaccgctcgtttatattaaatgttgcaataatagattatgcagttgggtacagacaatctaattgcttacaaagttgtttagactcacttaaacattgattcatgagataaaatgagatgataagcggttagttgacgttccaaatgcagacaacactttgacggatgacaaaggactcagaaagacaacaagtatatgattctgttcattcagaaacattttttttctctcaattttatagaaatattttttataaaagaataaaatcgtgaggaagaataaaaatggactgcagaacagatcaaattgcagaagcaaaagccaaacagaaagtgaattatttcttttaaataaattaaatttatatatttctattagaaagaaagaaagagaaagcagctgagcttacatggtccaaagctacaagctgattcccgaaagcatgtttatgtttattcacccacactggctcgctcactacaaacaaggtaaggtagaaaaggcacataataatatgaacatagcaagaaaatgtttgttaaaaaaaatctgaaatccttttaatgaaaagtggagctggagtcactggggcaaatccttagcctccacaaaggtgccgtgaaagccatagggcactctggaaggcagcatgatggtggcctccaacttcaaatcaacggcattcagaatctgcaactcggactgccacgtcacctcgtcatgcacaaaagccatcacgtacccttcatcctcattcccattccctccactgggcaaaaagaatggctctcctccgaaccttctctctccgtactcgtgcctcttcacttccccactctccaggtccaccttcgcgaaacccgacaccttcggccacggttccgccatgcacaagtacgcgaaccgggtttttctccccagccggttccggttcaccatccccgcctcaaggttcatttcctcaaccaccactcgccgcgtcgacttcccgcttctcaggttaagccttatttctgttaacacgcttttcagactctcttcggtgtcgttgaagattgaatccggtggcgtcatgcaggaaccaattaccactacttcgtctgtgtcgcgttcctcccacgcgttccagaagtggaagaagaacgtgtctggcgactccacccacacgatcctcgacgcgtcggaggcgtacttcggaagaattccgaaccgcgatttcttctcgccgtcatagatcaccggcgagcctccttttatcatttcgccgagcttgaacaccacctgctggtccgggatcacgacgaaattctcggtgatcgcgaagtcgtgcgtcatcgtcggagcgccgagtgggatttccacgtccggcgacttcttctcctcctccgccgagaaacggaagtatttgaggtacttgctcgtgacgtcgtagcttagagtgaaaagctcgccggagattggatccaccttcggatgcgcgatcatggaggaattgagctggtcgtggaagctgtagcggccgatcgtttccaggtcgccggaggcggtgatttggagctcgtaggggaggtcgtcctccgacatggcgaggagttttccgttgaagaagaccaggccggcgttggcggcgccggcgccattgcggtggtcgacgatgccgcacaagcctctcgcgtagaacagcatcagcctcgcgatgccggaatggccatggagctcgccgattgctttcggaaacaccggttttcccaattcgcgctcctgcatgagacgctgcgtttcggtgaagcggcaggcgtagctggcggtgccgtgattgattttaacggcgtggaccattccgtcgccgtcgaagaggtggtgaccggctttgggatggaacaatgggttggcgccgttacggagataaacgccgttaactgcgtctgggattgtgccaataacggggagggaatgttggacggggtgttccggaacgggggcgaagttaccggcaatttggacgcgtgggtcagtggttttggggaggggttggttgagctcgcgtgagagcaacgcgctctcgaacatgtccagggccttggctgcggctttttggaatgggttccactgaggcctttccgcggggagggaggtgggttctttggtaatttggggtattttggtgtagggttggtttggaaaatggatcactgggggggagtgtagagcacaatccaccacctttctaatgggcttcttctgaaatctaatggggaagcccaagtctgttaataataatgaatagaaagaggagaaggaggaggaggaagaagagagagggagagggaattgaggtttggcccaagtgcttgaattgagtgctgccatgatcatgatcatggagattgaatatcaagggggagggggagaagtgtggtttgaactttgatgtgtgtttttatttttattttattttattatatatattttatgagaaaaaagacaaggaaaggaaggcaaagagattgaaagtgaagaggggttttggagggggagaaagggagaaggaaaattgggtataaatagagtggggaaggggaaaataaaagaagtgttatttttaattttattttggggagggaaagggagtttgttttggaggtccacctcagacatgtaagagaagaccacgtggtggatttgtctgtgacttccaaattgtacgtgcgtgtggggaacctatcgcgacaccaaaacccttacgcaggcacaatgcagacttgattaagtcactcattcttatgagagatcaaattcaatcaactctccgggtattgaaatactacttcttcaaaggttattttcgtaaattcaattgcattcaaacaaattaataaatatatgcataaaaattattactaccatttaattacattcagttccagtaacaattgtgttggtgtttagattgagatttttatactaatatttattatttattccttattatcaccaattactttaaatatcacactgaattaatgattgagattattactaccatttatgtacaattaataaatttaaaataaaataattaatgattgattttaattacattcagttccagtaacaattattttggtatttagattgggatttttatacaaatttttatttatttagttatttcttattaaaattaaatgaattactttaaatatcacagtgtattaatcttcctacaactaaacttttggaatacaaaagtttatccaattgaaaaggaatcgttttacttcttaaaaacagaatatgtgagacgacatgcttaaaaaaaagtctcaatgaaattgcttttttttttagaagaatgaaattaatttttctacctctctgttaaaatattatatcaaataagataaaatttatatcttatcatgaagttttccaattatcatattatagtatgaaaaaattatatttataaagttggagttgattttttttnnnnnnnnnnnnnnnnnnnnnnnnnnnnnnnnnnnnnnnnnnnnnnnnnnnnnnnnnnnnnnnnnnnnnnnnnnnnnnnnnnnnnnnnnnnnnnnnnnnnnnnnnnnnnnnnnnnnnnnnnnnnnnnnnnnnnnnnnnnnnnnnnnnnnnnnnnnnnnnnnnnnnnnnnnnnnnnnnnnnnaattgtcagaaattaataatagatatttccaattagcatttatctgccaactaattttaaattagagtgattgctaattgaaacgtatagaatttgcatgtcatttagcattttttaattagcaccattagattataatcgggaccattcaaattatattatatatatagatatattacatcctaattttttctacattaaattttattgttcttcgtataatccctttatttatatttgagttaactatgtttttggtccctgaatttttttttgagtttttatttttagttcaaaaaaaattaacttatctcagtctgtcatgtttttcaaaatacatattccaaaataatttcaattaattaagtggaagattaagcaatgtttgaattaccgtaatttatttcttcatttgcatgtctataatagcctattgattgcgaatttctgtaattttccctacatcctagctttctcgaatataggcacagtagtgatcagagtcaaataaaaccggagaggcgcaatggtgcccataaaagtaagatgaaaatgagatacataggcacatgcagttaataagtactctttcatttcgtgtagtgcattttatttattttcatatatttcagtttatctgatagatcagttgttcatcgcgaatagggggggatcaagaagcgtaggaatatgtgtgctatttcttttcgaccacgtttcttagtcacatcattaataactgcatgctatagttagttacccaataatgcacagacactttaattgccatcgatcccactgtttcttccttctcctgatactttatacaaagctatggtgtggcccatgcaaatggattactacgtcttaatgtatctggccccctgctgttttcttcagctcagggacattcagaattccttaaccgaaactgtataattaccagtaggtatttaataattagggtggaaatcgttaaattactcaaattacactttattagaccaggatttaacttcttcttttttaaaaaaaatttaagatgcccgtactgataaaaaaaattaatataggagtcatatttatttattaaatatacacgtcttcttttaagatctaacggttttaaaactttattttgatatttttttaaaagtctaaactaatcttaaagtttatttcattaaaattttgcttgtaataaaatctttcaatagactaacaaacctatggatctaaatttatgtctaagctaatcagtttaatagactattaaatacataaactcaaaacagtatattataataataatattttatttatttaattttgcatgatagactttaattaaaaaaaatcttaaatgtgttagcatggctaatttgaataaataaacccttaaatatatctcaatttgacttacaaataaatttcatataacctagacctaatatgagctagctacgtcataggtttttgagtgacatatccctttctcatcccaaattattgaaattctcacaaaaaaatcccaaattatttgtatagaaggtatgatttattggaacgttcaattactttttgtgtatcattttcttacatctaggatttagttatacgtttatagtcttttataaaaatctccacccaaacctgcgagaatcatcaacattatgtgtaaacttctatgaaattaatttgttcgctaaaatcagcccctgattcgttaacattatttttcttttgatggaaatatttttgcatggccacagtctatcattaataaagttattataatgatctatgacatactcatcatcactttctcttcaaaaaaaatgacacactcacgtaaaaattgttattggtcctgacatggtgtgaaaggaaaccatcgtagtcgtagttagcgatggattcacgactcttcccacctcataattttattttccttaattgttttggttagaaaaactttaggagaaagaacgatacctcaatccaagggagcaaaaaccgtgaatgtaaatttaagaagggttattattttctctgagtaattatgagaaatacttttgcatggccacactctatcgataaatttcttattcaagggttatgaaaaattatgacaattaaaataaatttaagaaggaatacatttacttcaaaaaaaaaaagaagaatacatttacttgtattaaagtactccagactatactttcagtttcattttctctcttgttaataatttttgcgtaaatgttttttttagaatgctaaaaggaacataaaataaatccaagtgatttgtgtcctagaactagatatccagcttgttattgttgctgatcaaatcatatattgatattagttgagtccaagaattagattagtcatttgcatatgtttattagtgtagattttatttaacaggaattaaactattagaatagacatttcaagtctgtaataatatgattcacatataatacatattaaatcttattaataaggacaataacaactagcttttagtatataataaatatttctttttagtactgatatggcgtaatatcaaataattttggttaagaagtcaatatcaggccttgcctgccaaattatccgttacataattaattcaaaaaattttgatatacaacaaaacacgaatgaaagtaacaaaaacatgtatgttgaccttttagtagaggtcccccacaaatggtcgtgtataagtgtgtgaagaagcgaattcaagcggttgaattgaaagagagacgccattaatgccctcatatatataacggatggggcgggtaattggtttaattcccgttttggagttttgtgggcacatcctgttgaggattctggatgccattcaaggacaaattagccattggagccattttcaagggccattggacaaactagtatgatagcgaacaatgatatatgtatggctgttgccttaccacctttgtttcttcaagtttcctttcgaaaacgaaccccattcaactagatattgtagtgcacatggaatggaagacaccggcctctactttttattagctaggattgcaaatgctataccttgttgtctctagtattttgtttttgcttgtacaatttttcagatcgaatattactattctacagttggagtacttattagcttgttaagagggccacaacctactactacgtacctacaaattatagtataatagattttattaagaattgtgatatttcaacacctgcttatttcatatatcacatcaataattcttatttatttttataatttttatcacattatattatttattatatttatatttttcattctcttttaggtgtcaagtaggtcttgggtgtcaaaaatcttgttccttttactaaattaaaaagatgaatttcttttcttttctttttttctttacttcgttgtcatggaatatcagggaaattaatcgagaaggacacacttgacaaatgatgggtaactttgttcgcttcttatctgtgctaccaaaaagttagctcaaagtctgaaaatcttattgcgaacaaagtatccggagaaagctagctatctgattctctgattcgagaaacattttttcttctattttttatacataatttttcgtaagtatcttaactgctattgtgatgggcaggcaagtgtatcgtttgatacatttacaaatatttaagtatattataataaaacagcttaattcgtccatatttcatattgtcattttcgttagcaaattatcaagtgaagatatttctctgtccaatagcattctcggtataagaatatcttattgttaagaaatattcaacgtttttattttgatattttaaaaagaaacttgtctgttcttgcagttattgacaacaaaccataacaactgatcatactcaaagtgatttcgattgtttgattgatggtcactgactatataagcaagtaaaattcatttaaaagaaacgtaattggaattctgcaataccaggtctttccaaaggtgttcacacagttaataaactcgagaggataattaaataataatactacagtaacttatttatttgatgatttcataaaatttcttgtaatttaagagggagataccaagagaagagagaaaagtgtagaataagatagcttatgttagaaaagagagcgaaaaagaagtgttataaaaaatactataaaaatttgttgtgatatttcagtatcaataaagaataatgctattgctatggacttttttgaaaggtgtgtgtacaaaaggaggtcaaactatagcctctcaattttataaaagtgttgaagatagcacacatgaagagtgtgtagctgatataaacgcaatatttatcaaaataaatggaaggaaagagaatgacagctagtaaccaaaagagattaaaagagcatatatatactccggtcacaacagtgagaacttcaccaaactagattatgatttttatttatcctagtcttcgctctcaacaagtaataattatatataatttcttttataatatatacaagctaatattgaagtgagaattaagaacataagctcaacacactcgtatcattttgaaaagtttacaacaatcggttggtgtttcaatactcactaacacttaagaatgaaatttgctttcatcacaatgcaagagcctagttgagatcacaataaagcatggtatcatgtaacaagcaaggctgttaactaggtttgtgaaaccccatatcagaggcataaccgcttgtattttcattaattatgcagtagtgtactaaattgtgttctgttaatttcactgtattttgtggtcggttgcttttactggttgtttattgtataaatatccaaaactttatctagcttattcttagcacaacttctgttcaatgttatccatcttttaatattcaaaatttcaaatacatgttttgcctacaaaattaatttggtcgacaaaaccaaatcaaaccaagtgtaattaaatatggcgattggttgaggtgtcgaattgattgaattgttatgattagggtgaaggtagtttttttctagatatgttaatatcttaatccaggtattagagtgtcttgcttacaattagaggaggaattaccggggttagggtgcaccaccactcttcctaaaaaaaattaataaaaaaatgaaaattaaaggaaagaaaaaatattaaaaaaagataaaagggaaaaggaaaatatatataaagaaaacgtagtaaaaaaaagaaaagaaaagaaaagaaaagaatattaaaacaataaaaaggaaaaaatataaaaaaagaaaagaaaatataataaaaataaaatgggaaagagagataaaaaaaaaaagaaaggaagatgataaaatgaaaaaaataataataaaaaggaaaagattaaagaggaagagagagaaagaacacaagggagaggtctggacacaaaggaaaaaaaagaaacacaaatttcaagcgaatataaggagtcaaaacaattgtttcatttggtaaaccgaaaagagttttaggtatcttctcattcctttctttttccctcattttctctttcttcttcatgttgttattcttctaaagatttgcaactaaagtctcaagatattgtaccttatgcactggcggaggcagaaattttattgagaggggacgaacataaaaaaatatatatcataaataaaagtactccgaagacaatacaaatctaatacacaaaaaaattttaaaaaaatatattacagaaattaagatcacttcacttgttgactcttactctacgtgttttcatattgttaaaatcatctataattgaatatgtgttaaaactcaaaacaatttctttttcaacttatgtaattaaagaatcatcaagaaattggtctttgattctatttcaaagtctagtcttaattatcttcatagttgagaaagatctttaagtaattattgtagaaaatagaagagtgaatacaagtctaatcactttataaataagagggtaaatgatggactttctaggtcttgctagcccttgagtaaataacaatttattttattttaaaagattaacaacaacaataatgagaaataagagaagaaagaagaaaaagggaaaaaaaagaatgaaggaatacctgaaacccttctctttcattaattgcattaccaaatgacacaactttttttgacgctttctgttctcttgggatttgtatcttctttttctcttatgtgtatttatgtgttcagatctctcccttttataatgttctttctccctcttcctctttattttttccctttttattattattgttttttgttttatcatcttcctttcctttttccttttcctgttatctctctttccctttttatttttattatattttctttcccttttttttatatattttttccctcttttatgttttctttcctttttattgttctaattttttttaccacgttttctttatacttttttctttcccctttcacctttttttaatattttttttttttttttnnnnnnnnnnnnnnnnnnnnnnnnnnnnnnnnnnnnnnnnnnnnnnnnnnnnnnnnnnnnnnnnnnnnnnnnnnnnnnnnnnnnnnnnnnnnnnnnnnnnnnnnnnnnnnnnnnnnnnnnnnnnnnnnnnnnnnnnnnnnnnnnnnnnnnnnnnnnnnnnnnnnnnnnnnnnnnnnnnnnnnnnnnctttcatttttgttttatttttatttttttattaattttttaatatatatatatatatatatattttcaaatttttaaattttagggggggcgatggcccatcctagcccccctaattttgcctttgaccttatgaaggaaattatgggtataactaaagtcttttgtcaagctttgcgacgaaagtctcaagatatttcaaatattttacatttggtttcaactacaaaagagttacttcagtaattaagagagacaggttaggatgctttctttgttcatgttcaagaattttgcataaaacatgacattgacattccagatatgagtgcaaaatatgttggaaggagaggtcgtgctcaaaatgaacaagttgatttttctattgaaaaattttatagggtaaatatcttttgtgctacaattgattatcaattgcaagaattaaatagcaagttcaatgataatactgttgaattacttgctttgaccatgactttagattcaagaaacaagtacaagtcatttaacagtgcaaacttgttgataaattttattcaagagatttcacagaacaggaaaaattgcatttgaagatggaattacaacattttcagcttgacattcctaaacatccaaatttaattaatttatcaactacatctgaattatgtcaagggctagcaagaactggaaagtccatcatttaccctcttattgatagagtgattagacttgtacttactcttccagtttctataacaactactgaaagatctttctcagctatgaagataatcaagatcagacttcgaaataaaatagaaaaccaatttcttgataattctttgattacatacattgaaaaagaaattgttttaagttgtagcacgaattcaattatagatgattttaacaatatgaaaacacgtagagtaagagtcaagtgaagtgattttaatttctgtaatagtttttttatattaggtttgtattgtattcaaagtacttttatttatgatatagtttttgttatgttcgccccctctcgataaaattccagcctccgccaatgcttacaacgtagactaggactaaccttctctggtttctttaataaggatgatgctgaggatgcctttgaattaatggagagacaaacatagaaagtttttcttaactctggtctaataggatacgtggtatggataaagccacctttagccaaacaaatgacttatttcattctttgttccattacaaaaatgttttccttttgaagcaaatgaaagaaagggaatttctagttagctgacattgagataaatcaagcttgtcacttcagttgttgtacctctttaatggttcgaatatttctcatctcaagtatggatttgcactttctagttttacctctattagtctttcaaataacacataaaacctaaatatttcccaattttcactcaaaaagtgcaattcttaagacttaggctcatattgtgcaaccttgattgctaaaagaatttgacgaggtcataaatatgatcttcttgagtgcttttgatgatcatatcgttaatgtaaatctcaaacatctttcaaatctactacataaacgatttgttcatcatttggggtacgttgcttcaacattgtttagacggaaagacattactttgtaacaataaattgtcttttcatgtcattaaatgttttttctctttgtctaatataatgtattttaatttgattgtgcactaagtaagcatccataaaggtagtgatgaatctttaatgacaagctctttaaaagcctatagacattttataaaaacctatcttttgacatctctaatgataagcttaagcatatataggtgaacaacttctcggtagtttggggtttattcttgacatgtcaacaaacatctatgcaaacattgacaagattgtactttggttagaatttactcacaagttattgattaacctctgctttagttcatcttaggtgtcgttaaaccttagtagaattgactaaaaccattttagggttgttcctcaagtgttagaaaaaaggctccacatatttttaggggagatcaatgggggcttttttttcgttaattaccatttagggatcggttttgaattattataaaaaaatggataagtcgtaacatttattatgactttcgaattgaaaatcgtaaatgatgttataacttctaatttatttatttatttaaatgatattttacgacttatagttaattattttcaaaatttatgactttaaagtcattggatttttttaaaactagtttaatttttttaaaatttatgactttaaagtggttcgatttttttttactatttgaaagttgtcaattttttttatgacttcaaagtcgttaaagttttttttttacgattcaaagttgtaaagtttttattttattttattttttcaaatatttataaaaaaaattataaataatttttaatttaattatttaataaataaatttacttttactttgtttactttttttaattttttaatattttttatatggtttcatttaatattttctatattttttaatattattttatttaacacatttttatatggttttattaatatttttaaattcttggtatattgatttataaaatatggaccccaatattgaggtaatttattttcgtttacaagggaatgaaagtgattctaataaactttgtaaatatttttcaatttgtatatatggtcaacaaagtcagcttaatttaaattacaagaagcacacgctcacttgcaagcgagtaagaaattcgaaatgcatgattgattacgactttagtctttttaaatttaagtcttttgcattattttttaatttactaaacaaataataattcttaacattagtaaaaaaaaatatagataatatattagataaaaaaatatactaaataaattaatatactcaaaattaagaaaatattaaataaaataatataaaaatagagaaaatatattaaataaaagaatactaaaaaaatatagaaatattaaataaaatcatataaaaaatatattaaatattaaataaaactaaaaagttaaaatatatttatttgttaaataattaaattgaaaattatttacaatttttaaaaaattatttgaaaaaaataaaaaaaaatttatgactttgaagtcgtaaaaaaatcctatgattttaaagtcgtaaatttttttaaaattaaactgaagtcataaaatattttacgattttggttttaaaaaaattagtgaaattgtaatatattttatgacttcactttaaaaaaatagaaatcataatatcgattattcctttcaattcagaaatggtaacaaatgttgcgatttattctttttttttaataatttaaaatcgactttcatacaataaaaaaaaaaatctccattgatagtttcccccattgttaggtctcttacacccatgagcatgcatgagcaaagatttgaagatgtccaagtgctccagactctccaaagggtcatttatgtcattgtattaatctaggacttgctctacatttgtttggcacttgaaacttgaaactacggtctaacaagggttgattagttaccaaaactacctctacgtacgtcatataagatgggttcaaaattgggttcctttttcgttgagattaggggatagaactaacatatactaggtggacgatggtgtgccttctacaaggaaagcatgcacccaataactttgagtggtaaattatttataattattatttaatttgttgcagtagttttaggtttaaaattttatggattgcaacattctttttattcctacattgctgttcaagtaggaatttctaaaaaattaataataaataaattagcattagcttagtcgacataaaaaaaaacattaattttctgcatgaaaaaaacctttaaaatagtatatcacattttatttgtcacatcattaattaacagagttacatataaaaatcaatcaaaaaatgttagctaacattttataaataatttatatagtgacataaatagatactattttataaatatatataacatatttaagtttatctaattttatttttatgtatattatgtgcattctcttgcaagatgatgtcatccttaagtttaacaaaatgatacataatttcctaattttcttgacatttggaggtttttattaatacacatgtatttaataatttatttttgtaagatcaatttaagcctacggaatattttaaaatagcttctaagaaaaaatatcctagttttcaaatcgaatggattgatgtgttaagtatgctattctatttgaactaatgattataaaaattatgtttaaattttcatttaattttaaaaattgtaaagaaaattataaaatactttttattttatttaataaaaaatatatctttacagttattaaaataatatatcaattctaatttgagaaaatacatcatatatatatatatatattgatggtaattttattgattatcataataactatcttaaaaaaatattaattatgatttctaattagttaacaatataaaaatagaatatttgaactctattttttattaagagagagagaacccaaaacaaccctattaatttagtgctgaaattgaaaatgtttcctttttctctttggtcctgatcagtgatcagctagaaagatgcgtgctttatatggtcggagctttatacggctgaattgattaattcttgaactcaaaggcaaaaatgaatcacatgtacttaatattttagtcaaagatgatcagtaaacttagtgtaggtcctttagggagcatcaattgatatatacaccgacacaccatcgtgttcatgcctaaccagaccctaaacccacgtttccttgtgtaatgacaaagctctacctcattttggaatgaattttggtaaaaaagagggatagagaaaaaggaagaaaatgtaaaaaaataataatagaaaaaagatagatttgataactgatgtgatgataaaaagaagacataaataagcaaaaaagaacaaaaaaatgagatagaaaacaaaattgatatatatgttgagtattttctttgagacccacgctgatgctgaacccagtattaaagaagtatggaccataattaccactagtgaatgatatagtacgtttcaatgcatgcccttccaaagaagtaattaacaaaagaagtcatctaaaataattactgcgagtttataaatgatgcaaggttaactaattaaaggggcatatcatcattatgtacttacccgagagatataagatgagttggtatgattaatcaaaaagaaaaggaaaaaaaatatgaatttattttttctgctaaaaaaattaataattaatatttattgataaaaaaaaatattacatacttactaattgacatgaggaaaagttataaaatatcatatgatatgcaagtgattgagtgaaactaattcttttaatatataataaaagaagaggatgggggtttattcttaattattttaccccaaaggttttaagcctccctgatcatgtttcacctgaaataaaagaaaattcctgttgtattttttcttttaatttgttctttttcgtttattttgacctcatctagtattcttgaatggttttcaaattttctttttcttttcccttccggtttcatatctttctgtggttccaaatgattcgtaagggtctttagccatgtttgttaacttcatcattatgttaggagtagagattaattagatatgtaatattataattgtaaaaaaatatcatataaaagtattatgaaagtttgaaattaatttaattattatataaattcattgaaatataaaacactttataatttgcaggagtgaagaatatgtaaaattttatatcaaaaagaagataatatgtgatgaaaaaataaaacttagataaagtatataattttttaatcttaatttgatcatccaaaccaaattaattcaataatttagttcaaactacgtacctcataaatatctgtagggattaatgatgatcgtatacctaaaaatgtagattatagtatatcatattgttttctaaaccaactaattcaagatgtgtttagatatgcactagaatcatgttgaatggagaaattatacttttcaaaacaattatgttataactttcatctgaaagttcattatcattgaatttaacttgttctcaaacacacattaaatcaagccaaaatagagtcatgatcaatttgattaagcataaataaaaaatcatcttttaaagaagctagcttgagaaggtttatataaatttatacatttaagttaattttaacttataaacatttattttatttgtctttttattttttcttataattaattaggaagaagattatccaaacagattaattgtatatacagtggatcctgtaagaatcgatcaactagacttttaaggagcaaaaaccactataatatttaaggagtaatgtaactaaactaaaatatttatatatagtatataaaaataatatattatatatctttatgaaacataaacacgtgcatataagatgtatgaagattcaattcctcattattttggacaccttgtcaaaaaagcatggaagcattacatccattcccgtcaacttcttttctttcaacccatatatcactttgcaatggagacaaataaagtttgcaataggttaacgtttgaaattaggtaggtctaaaaatatatgccagatgtccttttaacacgatgacataaataatcccattttggaccacttatttgggaatataattcttaaaagttatttatttcatcgaaaaactctaattcataaaagttatttgcacacaccattttaacattgacttagatgtatattaaatttttttcatgataatattaatgtggagcatttaccaatttaattgattattaatctttgttaaaaatttgaatgattgatcatttttagtaagattaccctttccaatcatattattttcatccacaaggtttgaatctaagaccttatttaagaagatgaaacttagggaaattcagaccaataacttattaatagatgtacattaatttaatcaaacatataattaaccctttaataattatagattaccaacaattttaaatcataatttccttaccacaaacatttagattataaaaaagttatacataattaattcaaaataaataaatttaaataaaaaaaactaattgataacatgtgtgactacttaaagagagttaaattaaatgattaagtcgctnnnnnnnnnnnnnnnnnnnnnnnnnnnnnnnnnnnnnnnnnnnnnnnnnnnnnnnnnnnnnnnnnnnnnnnnnnnnnnnnnnnnnnnnnnnnnnnnnnnnnnnnnnnnnnnnnnnnnnnnnnnnnnnnnnnnnnnnnnnnnnnnnnnnnnnnnnnnnnnnnnnnnnnnnnnnnnnnnnnnnnnnnnnnnnnnnnnnnnnnnnnnnnnnnnnnnnnnnnnnnnnnnnnnnnnnnnnnnnnnnnnnnnnnnnnnnnnnnnnnnnnnnnnnnnnnnnnnnnnnnnnnnnnnnnnnnnnnnnnnnnnnnnnnnnnnnnnnnnnnnnnnnnnnnnnnnnnnnnnnnnnnnnnnnnnnnnnnnnnnnnnnnnnnnnnnnnnnnnnnnnnnnnnnnnnnnnnnnnnnnnnnnnnnnnnnnnnnnnnnnnnnnnnnnnnnnnnnnnnnnnnnnnnnnnnnnnnnnnnnnnnnnnnnnnnnnnnnnnnnnnnnnnnnnnnnnnnnnnnnnnnnnnnnnnnnnnnnnnnnnnnnnnnnnnnnnnnnnnnnnnnnnnnnnnnnnnnnnnnnnnnnnnnnnnnnnnnnnnnnnnnnnnnnnnnnnnnnnnnnnnnnnnnnnnnnnnnnnnnnnnnnnnnnnnnnnnnnnnnnnnnnnnnnnnnnnnnnnnnnnnnnnnnnnnnnnnnnnnnnnnnnnnnnnnnnnnnnnnnnnnnnnnnnnnnnnnnnnnnnnnnnnnnnnnnnnnnnnnnnnnnnnnnnnnnnnnnnnnnnnnnnnnnnnnnnnnnnnnnnnnnnnnnnnnnnnnnnnnnnnnnnnnnnnnnnnnnnnnnnnnnnnnnnnnnnnnnnnnnnnnnnnnnnnnnnnnnnnnnnnnnnnnnnnnnnnnnnnnnnnnnnnnnnnnnnnnnnnnnnnnnnnnnnnnnnnnnnnnnnnnnnnnnnnnnnnnnnnnnnnnnnnnnnnnnnnnnnnnnnnnnnnnnnnnnnnnnnnnnnnnnnnnnnnnnnnnnnnnnnnnnnnnnnnnnnnnnnnnnnnnnnnnnnnnnnnnnnnnnnnnnnnnnnnnnnnnnnnnnnnnnnnnnnnnnnnnnnnnnnnnnnnnnnnnnnnnnnnnnnnnnnnnnnnnnnnnnnnnnnnnnnnnnnnnnnnnnnnnnnnnnnnnnnnnnnnnnnnnnnnnnnnnnnnnnnnnnnnnnnnnnnnnnnnnnnnnnnnnnnnnnnnnnnnnnnnnnnnnnnnnnnnnnnnnnnnnnnnnnnnnnnnnnnnnnnnnnnnnnnnnnnnnnnnnnnnnnnnnnnnnnnnnnnnnnnnnnnnnnnnnnnnnnnnnnnnnnnnnnnnnnnnnnnnnnnnnnnnnnnnnnnnnnnnnnnnnnnnnnnnnnnnnnnnnnnnnnnnnnnnnnnnnnnnnnnnnnnnnnnnnnnnnnnnnnnnnnnnnnnnnnnnnnnnnnnnnnnnnnnnnnnnnnnnnnnnnnnnnnnnnnnnnnnnnnnnnnnnnnnnnnnnnnnnnnnnnnnnnnnnnnnnnnnnnnnnnnntttatgatattattttactcatgaaataaagggaagtaattaactttaatttaaacttgagttttaaaaatagactttgggaagaaaaggaacacttacactctgtttggtaagaataaaatgagtgaaaatggataagttagagtggaaatagagaggatgtttaaaattagggttgtttagtagaaagaaataatgagaaaaaaatgtaaatcttgtggattctgttattaaaatatttcatgtacgctctccaaggatggaattgataaaaaaaaaaaatgaagctaacccattccgttttgttattttacctaaaataacctttttttctcactcttactgcataattaatttttttttnnnnnnnnnnnnnnnnnnnnnnnnnnnnnnnnnnnnnnnnnnnnnnnnnnnnnnnnnnnnnnnnnnnnnnnnnnnnnnnnnnnnnnnnnnnnnnnnnnnnnnnnnnnnnnnnnnnnnnnnnnnnnnnnnnnnnnnnnnnnnnnnnnnnnnnnnnnnnnnnnnnnnnnnnnnnnnnnnnnnnnnnnnnnnnnnnnnnnnnnnnnnnnnnnnnnnnnnnnnnnnnnnnnnnnnnnnnnnnnnnnnnnnnnnnnnnnnnnnnnnnnnnnnnnnnnnnnnnnnnnnnnnnnnnnnnnnnnnnnnnnnnnnnnnnnnnnnnnnnnnnnnnnnnnnnnnnnnnnnnnnnnnnnnnnnnnnnnnnnnnnnnnnnnnnnnnnnnnnnnnnnnnnnnnnnnnnnnnnnnnnnnnnnnnnnnnnnnnnnnnnnnnnnnnnnnnnnnnnnnnnnnnnnnnnnnnnnnnnnnnnnnnnnnnnnnnnnnnnnnnnnnnnnnnnnnnnnnnnnnnnnnnnnnnnnnnnnnnnnnnnnnnnnnnnntgctattatttttttatatttttattaattatttttttaaccattacactattttataatgttaattttaatattttaacattatacttcaagatatcgataatgatagcttataggtttattttattatatttttccattattttttgaacatttttcatactaaacaattatttaaatcatttcaagatattttaccttgactctaattaatataatgaaagttaatatcaatttaactacatactgtttctattttatattaaatttgattaaaaatgttttaagatataaaataattaagtttaattaaaaatatttttatgttaattgaaactaaaaatgtaattaaaataattgatcaataaaaaatacatgaatttaaaactaatttaaaaaactaaattataaataactccaaaatgtattttatggaaaaataaaaatatcatataaatatatgtatgttcatttttatcttttaatatttatggtttagtttaatatataattatatcaaatacttataattaataataactttcacctatcacttttagttaatttttaatttttagttacttttatcaaacataaaaaaaatacatgtaaatatattttaattacttatatgaaaaacaaaacaaagtttactttaattactaataattggtcaaatattaggcccactatgtaacatccttgtttttcaacttctcgattactctcacactatgacactttactcaacatccttattggtcagaatcttctacagtttagaatccttcgtaagtaacccttttcgagacctcaaaaatcaactatgtctgctttcaggatcagtgattgtctctcacaaaccaacacatgacttttcagcatactttgtcttcactcacatgtttttcaggaaacttttcaaaagatcattcatctcatagctactccaagtcaaacaactaaattatggagttcttaagtgttaggctaccaaaaagtatatgcatcttattggtataggtagtagcagttaatttttttaagttattctcagttgtacaatctcatacttgcacaaccattggatctctctcattctggtgtgattcgatctgggtgttacatgtccaccagctttcgtcaggtccgtcctcgaaccacaccgtattgggagagaggtttgctcttatactgtttgtaacatttctaattttcaacattttagcggctctcacactacgacatttcactcaacatccttattggtaaaaaccccttataggtagtccttttcgagacctcaaaaattaattatgcttgttttcaggatcaatgattgtccctacaaataaacacaaaattttttagcatgttttgtcctcactcacgtttttcgaaaatttttccagaagattatccatctcataactatttcaagtcaaatacgtttaacgtagagttcttaagtgataaactactaaaaaatatatgtatcttattgatattgataatatcaattgatttttttaagtcattctcagttgttcaatcccataattgtacttccttttttatatctctttcattttgatgtgattcaatccaaatattagagactccacatttatacatgaatggcatttaacatcaacatcacatcatattatcttattatcttaggtcagtttttcttcttcatgaatacaacttaatggttgacactttcttatgaacaaaattgagaaggcgttataaagagagagaaaaacaaaagagtagtcatctaatgttaatgatataatttttaaggttaaattcctaatttttttatccgtcattttggtctttatattatttttagcaattttggtaccattttaaaaaaaatataattttagtctaatccttaattttatattgcttttagtctaattgaaccctaaatataacatattcacttaaaatatcataaaaacaatttaattaattaaaatttagaaaataaataaatatatgtaaaattgagagatatcgattttttgaaatataaggatcaaaattaaaaaaatacaaaaactgtagatcgagaactatactaaaaattaatatttagtctgtgtttaaattatttaaattactaaaattttattaaaataacactcgtataaatataaagtcaaataaaaatatcagtatttgcacaaatttataataagattatacataaataaatcatcatcaccaagtatatgagtttgttataattattatgaaattgttttagtttaattaaaagttttgaattcaaatcttagacatgtagttacatttaacgctgacaagtgacgttagacttaacctttgaaaattaactttaagaaaattcctatatctcactaattaaacattataacatttttcccaaatatctccccaatgctatgctagctcgtgacccggtcacgaaaacagacgaaagtcaatttagtacccaaccattataacattcccttttggggcttgggtgcccctcacctcatgccatcatgaccccatcgcttttattcaaaagcaaaccagatagctagaattagtacagaatatataagttttttgttgaacttccaatatcctcccctcaattatttatgtactttcaggtaaagctaaatctagaatctagatatatggctttattgtccgcagagcccaaacttctgtcttcttactcaaatcctctattaaattaaccaaaagatctcccaagtatatatgtgttgtgtggttattcggatgcaaatcatacatatattgttgatggtcctcttctgcaatagctttcatttactataatggatccaaaagatatcagggacataaattgtattttatacgtaaaataatttacagaatccttaactgattctttcaaccaggaaaagaagaaaatgaaaaaatattaaattacatgaatgaaaaatatatttaagtattaaattacatcaatgaaaaatatatttaagtcttatttatataatgcttttctctattattcttcattattttaattagtgtttttcctttttnaaccaggaaaagaaaaacaaaaaaaaaaaacaaaaaaacaaaactaccaactgtcgagaaccaccaataatttcgttgcgagtaatgtatggtacaagtaatatgctttcctattgggaaaaaataaatagtatgaaggccttttccttctttttctattttttttttacttttacttattttatagttatattatgtataattttagatacattttttattcttataatttagtattcttttcattttcgtccctgaaaaaaattgttttagtttcgtacatatatttttccttaaaacactttatataaaagtattttaaggaaaaacaaaaaataaatacattttataaagactaaaacaaaaataattgtaaggacgaaaatgaaaaaatattaaattacatgaataaaaaatatatttaagtattaaattacatcaatgaaacatatatttaagtcttatttatataatgcttttctctattattcttcattattttaattagtgtttttccttttttatttttctccttaattaatatatatgttgaaagaaaggaagtataatttttattttattttaagtttgtatcctcctctgggcgggccctctgcatagtccaagggtgtgaccatccaagactcataactaaaaagagtccaaaaaaaatataaaatataataattgtgtagtaacaaaaatttatattattttcgtaagtaagttgaaattattatttttttttgttttatatctctttttattcagattaaaacatgacatgtaagtaaaaagtaaaaagaaatatttttttctaataagttataatcataaattcatctaaataacaaataagtgtgaaagattaacgtgtaataaagctgttataataatttaaattgtttattttattctaacaaattatgaaacacatgcaacaatttaaattataaaaaattaaaactaaaagttagtattataataaataataataatatatgatgtgaagaaaatagaaaagagaaatagagagaaaaagaaaatgaagaggattttaagaaataaaattgcctaaaaaattatatatacatattgtgtataacttttttctttaaaacgtgatctcatatataaatatttgtgtgcctataattttttatgacataaattgaataaagattatatgcatcttactcgttgagatttattagaactattttgtttgttaaatgtaatcaaatgtataatttttaatgcattcgtgtgtttatttttatgtaaaatatgtttacatcttaaaatacttatatataagatgaattaggattgattttcttaaacaaagtttcaggtctaaccttaaatggaagaaaaaaaacatgattgaaaaaaatacactattaaagataattagttagatttttttttataatttttttaattataaaatcaatatatacttcatacaaataacataatttatcaatctattacatcaaccctaaaatgtcaaaagtgaccttactatgtcttctaaagctgagctactcttcggattcctttcagtgtcgcgcatgcaatctcataaaagaaggccaaattcaccaacaaaatgaaatcaagcaatcaacaaaaaaagaattaggtaacaaaagaatgaatttgacaatagcagaaattggtatttgaaaaaaaataaaaaactaatcgagtttggtcaatatgtgccgattgaaaggagtgcaaataagagtaacagaggatatttgtattaagattttgcacatggcatgcaaacgtatgtggacactctttgaagtggttggatatgtgctatctcgaaagtggggcatcttttttcaaggacatgctggccagagactctgcataattagaatttgttgattgtttatcattctgtttccctttagttcttaattacgtgcttggattagaccacacgcagaatatgtattccatttggaaatcgtaagttatctatgtagtgaatagtcacattaataaatcttttgtccctttagacattaattataatataacaccgcatttaattattgggtgcaacttttcatttattacgaattaaattttttaaagtcctttcttaacaaaaggagttgatcatattcacttctcctctacgccgttgatgggaatgttgcacattttccttttctttcatattaatatatcgtcattgagattgtcactgagtgtttttatcgtccagatacatgaaccggacatattaattaacttttaagcaccgggagacatccttttgactaaaatttccttccatttcatgtccttaattaattgctcaagtattatatatacattttcttttatgatataattatatataccttgataaatatggcaagaacttaattatatgcatttaaagtgcaatttgcgtttgattcacgacatcctaaaacaataaagtaaatgttatattcttcaataaaatacagtaagaaatattatcactataagcccaaatgagttatttactatcatttaaaataaatgaatttggtatggattagaatagaagtcgtgcatggtaggggtttttcatcaatatggagtaatttacttttaaaatttctaaattagtttagtttattgctttagaaaattgtggaacaaagtacaacttaattatcccgttccttttttcatgtaatcaatttactgtcacaaatctttaataattttaaaagaaaattatcttagtttaattttaaaaaatcccgtggcaatgtttgttaatagttttaaattgctctcttttatatttctcgtcaaaaagctttacagagctccaaaaaattcaaaaagttttctagttctttttaaactgaatcttctagaaatttttaatgcagttgaccaatctatgtaattaattctaatgagtacatggatagtatgtcacgaattagatgcgggtcaacctatcctgctgccgtgtctaataattattttgtaatagaagtcaatgttaatacttttttgttgctgaataagtcaatgatataaaactaatcaacgggggaaaatgggcaattcgatgcttattttgcaattgaaacgatgatcaacgtgaagaaaaaaaatgtgattagtgtcgcgacaataataatgtacgttgacataatattcaaacttgacataataaatatggatactatgtacacacaaaagaagctttgaatatatactacattcgtataattaagaagattattcacgagtatctttcccacaaatatcaaaatccaccacgtaattaattccttagtgacttagttaatctttaaacacatgggagccataacgaattaagcataattaaaaatgacatactacaaaatatcttaatcatatttgtgataatgttttcccagtctcaacattgagcctagacacaaagaaaactttttttttaagttaaaagtttaggtgaatcaaactccaatagtatattaaaataaaaataaatttcaagactcaataaatttaaatgaatatttactaattagtcaaaatccttaatgaactgaccaaccttcgttgatactgttattcgtcattattatgacaattgcaagacatgcaaacacaaatatttatataatactgtgtagctgtagttagaacttgacatcaacagttgccatataatataatatagcactttgctaacaaatggttattatgagttctgccataatttgacagaattaaaaaagaaaaaaaaaaaaaaaagatgtgacagtgctgctggtgccacctgttgatcgatgttagttacatagaacagatttgcgtgtggtataatttcaatggggtgcgatcgaggtattctgaagaagcaatttgagttatgcatcgcttacaattacatcaaaaccaagcatccatatcaacagctttttgtggcagaaaagcatatctatctaaaattgatggtagacacaacacaaaccaaagagtacaaactacaaagcgaccactcatccgagtgccatatcacaatccaaaatgagttcagctcaatgcataatgtctcgtatgtgctttaggtataattatgttttataattcttattttggcacaatttcatatttaattttaaatttggagtaagttttacgaagttgtgaattacacttatgactttattgagtcagtgaaaaaatttaagaggtcacaattataatatatgatttatcgtaaaaaagagcatgataaattactgaagttgtgtataacatgcatatatattagtttaaaaattgtagtaaattaaaaaattagtttaaaatttaaatatattttgtctctacgaatatgatttctttaatttaaattataatgttaaagattaaaaatacattattttataattttaaaaattaaaattatgctattttttacaaaaatttccttgcttaaattattggctgacagtacggataacctcactggtcactgcaacatacatataaaattaattcaatgctaaccagttcaaattcaaggaacaggttacaaccctcgaaagttcgaacatagaaatcattgtggtacttaccccccaaaaaaaaaagtcattaatatattgtggctaaattacagcatatatatgcttgaatgttgttacaagtatcatgtatatatgtacgttatataccaatgaggtatagttcattgactgaaaaagatgtgagttataatagatcttcaatatatgtcttttgatttttatggataatatatatatatatatatatattgtacaataatatatagcttgtcagtccggttgaacgttcattgttgtgaacttgaactaaaaaaacacttacctttacattattttaaaaactttaatgtggatttattggaaaaatgtggatcctgaactcaaattcaaacaagctataagtcacgttgcacatcaaaggcaaataatcttgtctgtagttgttgggattgatatatatcgtgtttagtttatcgtttacttttcattggatccacatatatctatctcgaagcaacacttaatatttgttgcttctgcattatcttgatatttcgacgtgcaaaaggtggttgaattgaagacacgtacaactacaagacgtcgaagtaaacacgcggtgagagaggtatgcatcatgcccccaccccaactcagattattcgtttcaactttctttcaggtttatttatttctgaccaaatttaagcgtggaaaggtaaatgaaaacgaaagcatagcttagttaatagttagtggcttcaaagtactgactttttgggctggggaggtgccagactaccgtttgattcatgaaacctacctgaaggctgaagcttgtcattatcatgattgatatagcgcatacggaagagaaagcaatgagacttagtgggtattagtgtagtttgcgtgaaagctataccaagctaactcaagcatgccatctcagaagaatgttcctatgcattcacggtatacgacgaatttatgttctattatgtaaggatacgaattctaaaggtttggagcaaagccaccttcataatttgctctaaactcagataccattttaattatcacgttcacccaaattagctataggatttaaccaaagtatgatcccaaatgtattttttttcttttacaaagcagacaagtctacatgcatgttaaataactcagataatcttgttcaagtcgaatacaatcattaatcatgcatgttaaatatgacaagggtgtcacaaataaagaaataaataaaaaaacttactggcatttgatttcttcattcctatataaattccaagtctttatggaacttttcaaagatttggaggagatcttatcaaaatggttttataacatttaacaatagagtctgagataaatggtgaaggaaaaatatggttaggtcacattagataatggggttttgaacatactcttagaaatttgcatcatcctttgctcaaatcattttggaataagttactgcctttgaaggtcaacacttatcttgaaaagtcgtgttggaaaggagaccaactaaagagaatttaactaaaaaaagctgtaattgacccaataaatgaattttgtattatctgtggtccaattctaaaaggcaaggacagtttttcttctgatgtgaaaaatctttgaagatgtgaaatattagttgtaatgtttagattatatgccacatttcaaaagttgagaaaagagcatcactttcaatttgtggactccctatctttgattctaaatcatgagcagtgttgaatttaattatgcacacaagtttatggtccattattaattggcttcttttaagtcaaaacattcaattctactactctagtaatactttagacttggtataaagtttagattatggtagcggattctatcaattaaaccaaatttctgatttttcaaaatcgaatgtttgaagggttatactgcaatgacattttacttctctctctttttggtcaattaaacaaaaattttaaaagggagtttaatctttgatacagtggtggagtggagttaggttttgatttatgacctatatatgatctaccaaaatctctttaccaggagtgaacttgtataagtctacgttgtcctcccatttctcgcatcctgttatcccatgtccagttaaattccaactagacttcaacataggcaagagtcaaaacacaacttcaactttattaatagtattgttagggacgtagagagtgaaatggaacagaaacgaaaaatgaaagtcgttctgagaaataaatagtacataatactaacattttcgttattttttaatatacatgactttagttgagcccaactgggatgagcaagttttgtgttaagttatcgacatgtttcaaatcaaaccaatgatttggtaggacaattgttatatccactctctctctttgcttagacactccccttttaatttgttatccaaaaatattctctttcaaaagatacactcccctattaatattaaaccagtaggatatagcacaaggagtacccccatccagtttcagaataatacaaacatcaaaatcaataggaactacttccaggaactatctggtttatccacctctgtttttctttttttataaaccaaacgaatttcatttacagttatgaaatatccaaggcctcacccctacataaaatatagcagcaaaaaacatgttctccctctagttatatggttctcaaaccctgcgccattgtcccctgcactcctattatcgagccatgcatctcccctacccatataaagtctagtgctgttatttcttcatagaatcagaaggatgccttctttcacctagctgaatcataaaaagttgctgtgaaatctacctttttagctttaaccctagaccagaccttagattgacagatttcaaaatgtgttgcatattatctttattgcctcttggtttatttcgaaactgtcaacagtcaacatgggagtgtatttttttttaaaaggaaacatttttggaaaacaaattagaaagaggattgtctaagggaaaagagagagtagatatggcaactggttttgttggatatctgaaattgactcatctaaagtttgggccgaacatttttttctaaagtagtctcttattctcttttttggagcttgtctatttttgttatacgttgtaagttgtaactgtgtgagaatgctttcgtgagagaacattcagtatatttttctgaaaagcaaatttaatatcattgataaagagcatttaggatattaattaggaagtgtgtaaatgacacataaattaaagaggtggcaacattgttgtaacattgatgcgaccatgtaaaataagaaatcatatcaagagaaagcgaaatttaaattaaaacagtaatggcaagaacttaaagatattatgtattccatttgttgttttccatagtcacaataatatgaacagcaaaagagtaattaggaaaagaactttaacaaaaataaggaaaggaagttcactcaatcaatatagtacaatcacacactgtacaactgcagctaatcaccaaaagacccttccaacaaaggctactcacttatcgtcatgccccaatcttaatgcaatcattactttaataattttaaacccttgtatttactaatgcaacaaataagaaaaaaaaaatacttttgtgataaaattgggaacaaaaacgattaattctttagagttactcaaataataaaacctatgtaattatgagaagaaaaaacaataaaaataaaaaaattatattatagttgaatagtaaattaaaaaataaatgcacgactttaagtggtaatgtgactaataacttctaatatttatcattaaattttatccaaatgtttgagtatgggtttgggtcagtaacttttaattggaagaaaatagtaaaacttaaaagagaataaacatgctttataattacagtacagttcccgtcaatgaaagggtggaaaatattaaaaaggaatcgttcatgcttactgtacatatgacaagggattaaacatcaaaccctctcccatgtcatttacaaaagaaaatttaaatgttaaataaagcagaaaatgttatgcgaggtaattgtatatttgaggattgctcttgtccctctctagatactccctgtcaatgaggctttcaatcctttttttcaaatcagcaggttttattgggaatttcagctgtacaaaaaacaataaatacctaaagtaagtattatatccccgaaaatcacacaaaagtagcatcaagtgtgtggtttttatttaatcaaaatagaagggatcatgatgcattttacatcgttttcagtagtaaatcggtacaaagtggcttcctnnnnnnnnnnaaataaatgcacgactttaagtggtaatgtgactaataacttctaatatttatcattaaattttatccaaatgtttgagtatgggtttgggtcagtaacttttaattggaagaaaatagtaaaacttaaaagagaataaacatgctttataattacagtacagttcccgtcaatgaaagggtggaaaatattaaaaaggaatcgttcatgcttactgtacatatgacaagggattaaacatcaaaccctctcccatgtcatttacaaaagaaaatttaaatgttaaataaagcagaaaatgttatgcgaggtaattgtatatttgaggattgctcttgtccctctctagatactccctgtcaatgaggctttcaatcctttttttcaaatcagcaggttttattgggaatttcagctgtacaaaaaacaataaatacctaaagtaagtattatatccccgaaaatcacacaaaagtagcatcaagtgtgtggtttttatttaatcaaaatagaagggatcatgatgcattttacatcgttttcagtagtaaatcggtacaaagtggcttcctctaaaactaagccatcagagtagcaggaacacattattttgaaatcgaaatattaggagttgacaaagatacaatttgaattaagaaatgaaagataagaattgagttcacctgttggaagagttcagtaataagaagggtgtgactaagcacttttctagtcttcattatcctcacaatagcagcatcaatctgaaccatgacaataatgaaattttttgttacagatgataaccagttttaagaagagttggttacataaacatttgatcttggatacactataccaggacatcctggacctaagataagtataacaggtttcttgtgtttggcattacattgttagatgtccaagcataagtcattgagatatatgtgtacatatataaagacaaggtggaaacatcgcaacttcaaaattagttatcattgtaaccaaaaaaaaaatgaatataactattattctgatacactaaaaaaaaattattattctgatattcatattttgtaaaataaaattaatgaaaatatatttggtaattaaaacttcctccaatcctatttataagacccaattatctaattcatcaagattaagaaaaatgattaatttagttgataacaataaatgtttaaattttttttcaaaattaccattttcattaatactcctctctattttctaattgtttgccatcacaacctctatttaattagggatattttcgtcttaaaaaattaatgcaaggccattatggattagtcttataaaaaggagcaagcaccggttgtaattttggtcctataaataggactggagagagtatatataatatcccatgcctatgcatcttagattctcatgaatttgaaagggtaccaaatgtcagacaagatagcactgcaccaaacaaacaccttgattctatgagcatcttgtaaggttgtgtcggataggggtgagtttttttttttgggtgaattcggataggggtgagtgaaattgaataaatgaattctaacgaaataaagcgaaatggaaaaaagaccacttccatctcattcccccaaataaatagaaacggaagaaaaagaggtattggatggaaatcatggaataaaatggaatgcattctatttctatcaagttccatttcactccatttcatccccttttactaatccaaacattacctaaaccacagcatcaattccaaaaaagtggggaacatttgaagggaaagaacattaacctgatactgacggtcttggaaaactctttcggtggtgcttgtgttctcctcgactgtctccttcaattgaattgcattcacctgcacttcataacttccaaattagtatgaaaaaaacctgattaaagacaaatttataccaaacttttaactttgaggtagaattaaaacacaaagttcagattcctccaatatgagaccaagtgttcaaaagcaatgagaaatacctttatacggtaaagaggagctgtaaacccatcattaaaaacaaatgagtcatcatcctccacatctcttcctttgggcatctgttgcatgttcattaaaggggaaaatattgagaaatatacggagaccataattacaaataaaaattgtatattggaaattatacaaatgattacaaacacaccttttgtaggacacgaactttaccacaagctagtgattgcagagtccttctgagttccttatcctcaataccagtagcatctttgatatcttgaagacttagcttctcagcatcattgaataacattacaacaacagtctggaggacagccaggcatgcagattaatattaaaaaaaatggaaatttatgcaataaaagatgctaagataaactgcaaaaataaatggagattttaacattttaaatgatggtttttgaaaacctgatatagggacacagccaactcctttcttcctttgggaaactctgccttcaagacacagtgacctagtgaattttgccacatcagacgtcttccactgtatttgcttagatagaactctttgaaaatatcctgaagacccaatagaggaaagaaaggaccatgtcaagggaatcactcaaactaccaagaccacagttaaaagagaaatcagtcactagcacgtgcagaacctggtaaacattcaattcatgaggaagtctaacatccatgggcggatatgttggccagtacctgcactcatccaactccagttagattctccagaaatctttctatcgacacacacacacatatatatgatgagaagacacaacgcttaccctgtggttaaaacatgaacactcatttcaatccctgatgcaagttttgacctcgcctgtgatgactgtttgaatgactcatttatttcttttgataattcaatgtcctgatttacaaaaatatgagatgtagttgacagaagctgtgatgttaataagaactataacaattcatgaagtttgtcagatcatcatcattcaaaagatcatcacacaaaataataaaaccaagcatatgatatataaatgtacttttcatcaacaaacgtactggaatctatgtttatgcagaatgtttaaaatttacatgtctgatataaatacttcatatcaatcaaacaaacaaaaacgccactatgatcttgctgcacattactgctagggaacatattctatacacacagaagtatacaccataaaagggggtaacaaatgaactaatatcataacatcttcccatgcaaattttattacatttaattaaatgaataaatgacttgagtatttgtctatatgaccatttcccacaactagatatttaaatcaaagggtgtttggttattcattggaaagttgtttcacacatgcaaagaaaaaatcatggaaggaaaaattttatgttgatttatatgtccattaggttctattccaacaaaaagacaaacacacatcagatactgagtttgattttgattcctctagaatattttttgagaaattaaaataatcttctctatatcaaaatgaagtaatgcacacctacatttaaagcctactaaaatcctccattaaggcattaaccattaaaaacaattacaaaaataaccccaatttagtacctttttttaaagaatttgaccaatatcatacgactctagtactgttttcagttaaagaaaaaagatcaatgggttatttgtagtgatttctttttaaattgtatagggatgcttttgaaggtattgaaaaataggggaaatatgtgggcaatttcaggcaaatgctgggttagtgggataaactgtctaaatgttgaaaaaaatattggacctttcaaaataggcaacaacaacagaagctctgatctaaccctttgagaaaggggttgaaaagggtttctcaatggatttgaattccctgtaaattggcaggccaaagaaaagtgaaagtgataggtaggagaaagaaaagcccagttgatgattgccatcaatcagtcattgccacccaagcatggaagtgacaaaaattataagaaaacatctattgaacagtagtccacaatttgaatcaaatctttaaattaaaaattgactccaagaagaatcatgtataccttaaacatcccttccagtttgtttgtgaactggctgccacactcagtcttcaactgtattaatgaaagaaaactattaacattactaataatattgctaagaaaccatctattgatttcagatgttaaaataggggaagagaaaccttgaccttggagatcatagatttctcagcgtcaatagaagcactctttcctaaaagcagtcttttagcaagatctttcttatagaatgcttcaaatacatccttgccctaacaataaaaaatcaataatgccaatatcagcatggagagaaagaccaataggaatgcctgattatggcagaagcctgaataaaaaattcagaaacaattaattatttgctattccaataaaacattgagcatacctgaatgaacctgaataacaccaggactttatcaagtgtagcctccagttcctcttcagaagtacccttattacctgcacgaagcttctcatccaaaaactttgcaatcaactctgcaggtcgattctgtcatatgaaaatagcataacagtgagttgattgcaagtcacgtcatacaccaaacatcccaatttgagtgtaaatggttacttgacataaaaagtttaactagctaatgacaaaatggtacgtgttagctatatgtcctttcctactactaactaccgtaaaaaaagttttggtgctaattgttcagttccttgactaacattatgttagtggtgatatactatggaacaaggaaagactagcacaaaggtcaacccaaaacatatcagttcaagctttctatcttgaggaatttccacatgttagtatggaaacaacaccacacaaaagctataaatcataacggaaaaatacataatacctgacgaagattgataagatactcaaatgcatctttaattgaattgctgaaagcttcattcttgaaaaagctttcttcccatattgtgtcaagagaagccttaaattcaagaagggatgagaccatatctttatctttctcctcatccataacaatgccctgcccagttctcctgatgtatgaactaagggcctgcttcagtgattcaagagcattgacccttgaaaagagtgagtgcattctctgaaggtcttcaatacgattcccatccataagcatagtaaaaccctgtaaaagaagacaaaaataaagtaaagaaggggaggggggggggagttgcaaaggaaattttaccagacaaaaatccaaaaattgtttttagaaccttgtcaagaatggcaggtatatgacgttcaagaagttgcttttcagcagtcgctatcaatggtttcctagtgcttgcatccaagtacaacaaacatctttcatgttcctcttgcaatcttgtctataaaatgagtatccaaaaacatacccacagtaaatacaatgtggaacaaggatgggattgaaattaaaaagaaagataacttgtatggtcaaacaaaaatatttaaagtgaaaagttttggcatgatccattagttaaaaaatacaaaagcagcatataggaatgtcaatgattaaagctaaaattataatacacaaaagtaagggaaaagaagcacctcaacatgcttcaagtaatctggagcatctgattgctgcatgtatttcataccttcagcagcataaaattcggatgtgcattcaaggaatggcttctcgaaggtttctgcataaattcccagagcagtaaacatcttcaaaagatgatttagaagagttctatccactgattcacctgatctgaaaaatcagacaaaattgaaaatgtaagacttagagtatgttgaagaattatatgccctaattcatatacagatggatcagctagtcaactccctgcagtaagagtgaaaattactggccaagtcacataattattgtggaagatgagaaacaaaaattttctgaatatgcttgattgtgttttctacccagcagaatggcctgtttatattcagatactactactacttcctaaaatgcattgaacctagctaaaccaagcatctaggccacaatgccacaatgaaaaacaaacaataaagaagctctaatatcataaaatactcccatttccaacaattatcacaataggaatctctgtatggtgtttattatatatcactattctgaaattattactttaattatacactgatggacccattttttggcaagatatagattctcaggtcacaaggcagcacctttaacattttaccaagtctctccatcctgcccaacatattcaataataaaaaagtggagatatgattgactacaacagtaggcaattggtggaagatgggtttacaggtagttcaaggattatttctttcaaaaataattatgaaaaaagcccatctctaacaagaaatccattccaaacccattcagaaatctcgattctagttccctcatgtcagagtgatgattcctgattttacagaataaaaagcagagtggtaacttaaggtctcaccaaacaaatggtcactctgcttggaatattaagaaaattggatggccaataaggtaattgccacaaggaagggaatgggaattaaaaggggtaaacacacatgggtgaggaggacagaataaaaaataaagggaatattcacgctgttaagttttctgcataaccaagagctggattgacaaggaatagtgggaggtcccggaggtggaaaataattagggaaaaacaaaaaaaaatatgattgaaaaatatgtagtgcatagaaggcacgaactgagggcaaaaaggcaatgggcttgggctagaggtttagtatatctgcattttgcaaaattctagatttatcttttattctgcacttctgttcttgtaaagaagtagtttttgttggctttatcagtaacaactggttcccatcacatgaattcaagaatgcatatacaaaatacatgcagaagaacctgcacatacactgttctagtcattttcaaaactgagattgcaaaatataaattacctttcacttctgatcatacgaagaagaccagtaacagttttatgttctacttctggagatagagaaagatgtttgcggaaaagttgcaaacccatgtcccataatgactgtacatttgttgtttgtttcacatacgtcctatccagaaacaaggctataccacgaatcatcaacatttggtcacaaagatcctgccaacatctctcaactagcgatagaaaaacaatcaaatctgggctttggcctactaaagactgcagtgctgcagatatatgtgcttcacactcctttttaattcgttgataaagatttccccccattttgtaaaggcaaagatcattcacagcctatggaaaagaattgagttcccataaaactctaatgagctaatgtgtggcgaatattcactgggctaaattaaacccactacctgataaaataaaaaggttttccatgattacctgataaagattctccaagtcacaagaaacaggttgcttcaagaatatagcaccaatagctgacttcaattttgcccatgtatcctcctcaaaattttggggcaatgttggtataccttcataagaaaaaacaaagtataaaaaaaatgtagtagtcatccaattcaattcattaaaaagagggtgattcattggacaagattcccaccaagtgtggtctagggaaggtagacacatgcagcctaactacctcaagaggggacgctgtttccaagatttaaaaccatggcctccaactcacaagacagcaaccttatctatgtgccaagcctcacccccaatcatcccattcataagataaatatttaatatttgctatatattactgtatcaatgaattaagaaaaaaaaatgaaactaagaataaagttcaaagaaggaaatgaaaacgagctctctagagttcaaatttcactttccaaagactaatacgactaaaaacgaaagaagagcgctgtgcagctgttgaagtataaacatcggagaagagcacgaagcaaaaaagcaagaaactaaaatgcagcttacaagtgaactaacaaagtaataaacacaaatcgatgaattcaaatattgaatccggcatctgaagagagcaagaattgaggaaacagaagagtaatcgattggtcaatagtgaagtacctttgtgaaacttaatgagaagcttcttgggggggtggggaggagtggcttttttgcgagacaaattggcggcgacgagagcgggcgcattggggtcatcggaggcggcggcgggggattccaaaacggcgtcgtcgccgttcttagagtcgatggatttcgccttcttcataggcggtgagagtttcgtattagacatcaacaacaacaacgcattgagtgagtgaagctaaacagaagaagaggtcgagggaggggtgtgagagagagattgagttgagacgatgatgagaagaagattacaaaatcagactagcacaaagttctcatttttaaatctatttttatatatttattttccctttttttcttttattttcatttaaattaaaatataaaaaggttcaatgaaaatcatttcagaacttttttcttgtatatcaacaattgtttaacagaaaaatggatatgtaatatttacatagttataatcataatttatcatgtaattttgttggcttttaaaaattttattttgaaattatttaaacaataatttttataattaaataatagtataaaattgttttatatatttagacgttaaaatcttaatttaatatataaaaatattagggaaaaaatagtatatgctttcataatcaataagaaagtaagaaattatatcatttataatagcattatgttaaaagttatacttatattatttttaattaattggtaatataaaatattttataatatcttacataaaaattaatcttaaaaatatcaaaataaaggaataaaaagtaactactaataatttcaagaaatttgagataatgaaatatttaaaaaaataaaataaacttaaggtaagattgaatttaacgaatagatatacgattaggaatgacaaattatatcaaaatcttattgatattgacaaaaatattcataaatgaattaaatattaatcctacaagtatataggatacaaataaaaacataactactcataaaaaatttaatatatagaatttaaacataactacgtatataaaatatattacaagccatatcaaaatacaannnnnnnnnnnnnnnnnnnnnnnnnnnnnnnnnnnnnnnnnnnnnnnnnnnnnnnnnnnnnnnnnnnnnnnnnnnnnnnnnnnnnnnnnnnnnnnnnnnnnnnnnnnnnnnnnnnnnnnnnnnnnnnnnnnnnnnnnnnnnnnnnnnnnnnnnnnnnnnnnnnnnnnnnnnnnnnnnnnnnnnnnnnnnnnnnnnnnnnnnnnnnnnnnnnnnnnnnnnnnnnnnnnnnnnnnnnnnnnnnnnnnnnnnnnnnnnnnnnnnnnnnnnnnnnnnnnnnnnnnnnnnnnnnnnnnnnnnnnnnnnnnnnnnnnnnnnnnnnnnnnnnnnnnnnnnnnnnnnnnnnnnnnnnnnnnnnnnnnnnnnnnnnnnnnnnnnnnnnnnnnnnnnnnnnnnnnnnnnnnnnnnnnnnnnnnnnnnnnnnnnnnnnnnnnnnnnnnnnnnnnnnnnnnnnnnnnnnnnnnnnnnnnnnnnnnnnnnnnnnnnnnnnnnnnnnnnttgattaaataagtctttttttgtctttgttctgtcttcatgcatatttttcaattttttgaacaaaaaattaattttgttagtagattgtcattcatctaagataattttatacataaaaaaattaaatacaattttttcactgaataaatcattttcatgtgaaagtaatgggtcttacaccagtacattatttttttcttcttctttataaacctaacttagaaagcatgaagtgagacaaaattgttacttattttataaaagaaaatattcaaataagaatgtgataatagtattccattgtactgtcactttcaaaatttaatatttttgtaaaattgtttatgtggaaatattatttaataataatatccttgatgatattattttatatttaacaaattttatttcttcgttatctcgatgaattaaaattttgttatgaatttcaattaaaaaatcaattatgttattttattatgtattatatcttagtatgtttgattaatagaatattcattgttaatttcctcatctgttttttgaataacttgttaatttcctcatcaaagattactaattttttagtcttactcactttgaggtatgagtgacaaataaaacttgacccagcaatctacttggtatgtcccattttgcctaccaaaaaacgagcttaaaaaagggcgagataagttagcttactaggtccattttttattttttaaaataaataaaatatagtacaagaatttggattttagtttcattttatataaaggggatgacgtaataatttaaattagagatgattaataattaaaagtaaatatttctcaattaattgtttttttattaatgtcggtattggagacaaagcaattgcataagttagatgaaataatacgactaaaaactagataaacaagtgtaattttaactttatactggtatcagtttacgtcagtaatattgtttcaacaatatcatttttttaaaaagtaattccttataggcacactaaaatattaaacaattaatatcatttttaatttattatattttataattattttatttgatacattaaattttaaaattttcacgttaattttttaagtttttataaagtatttaattttaatcctttcttctaaaaacattaaaaataaataaaataattaattgaatataataataattaaaaatcatcgttatctttattttattttaaaaaatataaaagaccctaatttctaacctttattcttcccctgacaccaatagagagttggtttttctaattagcgaagcctcaaacccaggagtcgttgttttgaatatgcataagaagaacactttcgccaccaataatgcaagtagcagattctttgtcataaacccaaatctggctgagtccgtccatgtacacttcccccgaatcgctaccactagagaaaaatcgtaacacaaggaagcaaaccacaaaagggacgggcagtgttgcaaaaaacaagcaagcgattcaaaaggggcgaaggatctaggtggtggtccggtgctggtggtggtgttggtgttggtgttcgccggtgtgttgtgtttttgtgtgtctgtgaggaagatgacgaggacgaagggaatggactgggacaaatctgctggctttttttttttggaaaaaacacagtgaagatttttaacccttatcantggctttttttttttttttggagaaaacacactgaagatttttaaccctttttattttaaaatttaacagaattattaatgttgttaacggaaataggaaaaaagattaaaatcagacactttgtaattaaaagatcaaaataaaatttttgtattaaaataaaaaaattaagaaacataataaattaaaaattacattaaactaatattaaatatgaatgtttctcttacttaacaatacttaaattaaatgtgagaacaattacttaatttagtccactttacctaccctcaatagttgttaagaaaaacctgctaaaaagtagtttgaaataatttgcgtaagaacttagactgaagtcttcttattgccattatacatattttaaaaaatagttattgaaaaatgctagtaatttgatattatggaacactattttgtacaaaagaagagagaaattaaaaacaaaataagagaaaatgtggagatatagttatgattaatgtaattgataaaataaagaaaaaataatttataaagttaaatattttatataaataaatggtacatgatcattaatgtgctatgcgacacctaaaaaaagggagaaaaaagagtggaaaatacaagaaataaattttatataatgatgtgataagaagagaaaaagagattgttggggctctcggtaaaattttctaagcgtaaagatctgtcatatttaaaaaattggctaattcgatttgttatgaaaaatactgctttttcaattggtgatttgaagatgagtatattatgacaggatggaaagcaattttatgtgagttgatgttgtgattaagtatcgacattagaattaagtgcatatatattgtttagtaagatttgaaagccattcgattacatgaacataagaggatttaattgtcaatttgaaagaaagtttactagaggtgtaatgactaatgttaatttaattggaaaattcagggttgatcctgaaaatttttggcctgagacaaagtgaaaaaaatgggtccataatacacattttttttaaatacaaataatattaattaagggatggaaaaaatggacattaacatacaaattttttgaaatacaaataatattaaaattaagggatgaaaaaaataggcccttaacacacaaattttttaaatacaaataatattaaaattaagggatgaaaaaatgggtctctaacacacaaaaaatggaccctaacatacaaattttttgaaatacaaataatattaaatctcagggatagaaaaaatgggtctctaatacacaatttttttaaaatataaataatattaaaattaagagatggataaaatgaacccctaacacacaaaatggacctctaatataaattttatttttttaataaaaaattttacttaaaccacccacacaaaaatttttaggccttgggcggacgctctgcttgccctgccccagggccgagtctgggaaaatcaaaaagaagtttgatggaagtgtaatgctcatttccatggataatcaaaatgtgaaagttgataaagaaaaaaaaacttacaagaagtgtattgctcatttagatggataattcaacagtttagtaaaaaaactataaataggcaagttggtagcctttcttttaggcagaacatttgcacaagtattattttttctagggaagaggctaccaattatatagcaatgtgtatgtttaaattcatattttaatgcaatttatcttttctattattcattttcttttgatcaaacatctctttttctccatttattctccaaactcttactcttttattttcttcatttcatactgcatttcgaatacccaaacaattatacttttaattatgcacacttttcttattgtaaatgtaatcgaagaacttttgttttgattttattaacgatatatctttattttttaaaatattagtttcacataattttctgattgtggacataattaaagaatttttgttttaatttgatcagtgtgatatatcttttctaaaagatatttgtttcacataattctctgattgtaaatataattgaaggttttttttttcaatttcataaacaattatatctttatttttgaagatattttaactttatataacattttttatgcattattagttgttcaaatattttttttaattaatcttattattctcctagttgaaagttaaaacaatactagtttaaccaaaaaaaattataattgtgattcagtcttattaaataaaataagttatttgtgattgatgataattatttaataaattttcatcataaacaaaaatattagaaggatgtttaaaataacgaaatatctctatatcattaatttttttataaataacataactgatagttcttttatgtattttaatttgtcggcttgtaaatttcattttcaaacgaaccacatgtatgataatcaaagaacaatcaagttgaccacattccaagttgggtgcttttgacttggcatggacaagacatcgtaacaatttatatagtcccttaagactgccaagttcaaagcctcacacgagtactagccctggtggacgcacctcaactacacctataaaacacccacatatcctcatgcactttttcaaccctcacactctccaattcagcatttctcacaagattgaagaattagcaaagttatagctagcagagaagctaaagggtacctaacttattactaggcttcagattctattcagcaacaagctcactgcatcacacaacatcatgacgagtggaccaaagatagtgcacatcgaaacacggtacgtggaaaccgacgctatacacttcagagatgtggttcagcacctcacagggaagaactcctcaacaacaaattgggtaggaaatggtgcctcattctcatccgtggcatgttcttcagattataataaaagaggaattgcaaatggtggtgtcagtgccaagccacatgaagatagcaccaatgatggtaaaaagaatagtgttgcatcttccatgctactcatgaacgtgtccttcaaagactttgagggtttgttgtctgatatgcctcccatggaggagttgctcatgttgtaggtggaggaacaccttttttttcctactagttttcgaattttctctattttatgtcggtattgctgaaaatcatttaattataatttattatatataataaatttattaatttttaaaatatttatcttaaattaatatttcaaatagaaatttgtaattgaatgagagtataaaatacataaacattacactctatacataatgtcgagtttgtacaagtagaacagtttgatgcgtttaactgctgaggatgagactttactagatgcataactgttctgtgcaaattttttcatcttaattcgaaatcaaataaaggaaaataaaaaataaagataaaataaaggaatacttttgagttaatatatatggaactaccatatttttatttcttcaagtcatgaaacgataaattttgaagactgcattccagaaaattgcgcaaactgcctgttgcagaagttttattgattgtggggacatgaaaaattaggagttgtcccctctatgaaaaggaaactctgtacgacggaaacttgaccatatatttttattcataggtcaattgtacagactcgcgagaggatcgatctaatctaagagacttttatactgtttaaataacatgtggtagtaggaccgtatatattaaatggaaaatgatgggtggaaatccagttgctattttataaaaagaaaaaagaaatagagataaaaaatgacacattgaaagagataaagatatattgttttaggattactatttgaaagtgtgatttattatcacttaggtccgacaaatataagaattttaaaaagatttttaaaagtataatttatctttcattttaatttaatcattaatttttttttaagttaacatctgtgtttacttgatatgttatctgcttacgtgataattgataatacatacatgaatgacatgtgataattcgatatatatatatatatgcaactaacctaataatatacatgtatgtgctagtttaaccaatgataaaaaatgataataactgttaactagtcatttatgtgtacaaagtcaattattacgtatgtatcatcaactgaaataagtatgcatcaccaagtgacacaaatattaacttaaacaaaaatattttaatggtaaggttaaagtgacaaataaaatacagggatttttttcaatttttattaatttccagacatttaaatgatggtgggttacactataccaaaattgatatttatcctgtcggtttaagatttaatatataattgggtcttaaaattagatctttgaagctggtttatgactgcttaaaaaaaaagggaattatacaactccggccatgtattggacagtcaccacactaattaatattacgttaatgtttaaggacaacttttgcagtaatacgaaattacggaaaccgttagtagaaaaagaattgcaattgtgttattagtataatctaaagaagacgccaaaagcttcctttttgcatgccttctagacatgtattctagtccttttcttggtttcaaattatttttcttattttccttttttattagctccttatttactcgtatggaaaaagaagaggttatttatatttttcaatggtaatattttaatatttttttcattattattattattattaaggacaaaatcataattacatgtcatctaacattaaaacagataatatcttgaatatggtgaccttaaaaatatttaacaaatttgaagttaaaataatattaaaaaagacttaaatcactcttgaccctaaccttgcctgagagcttgttctataatgttaaaagtttcatatcttaatgttaaaaagtaaatactgataaatttgtgataaattggaataataattcttctttctttcattcattcactccattctcttctatgttttccctcaacatgatgttcttatataagagagaaattcaacaaaatgctaataatacgggataataacaaactaaacaaactataacaacctaacaaatcctaacaataatttgaaatttaaattatacaattcaacactccccctcaagttggtacatgaatatcggtcatgcccaacttgtcaattgcttcttcagacacactagacatttttctaggaatgactttgatcagcaataggttcaagaggtgcttcaggtgcttcaggatagtccacgtgcttcgattatgtgaggtagaaagaaaattgaaatacgagaagtgattcggaacaataacatgttcatgtcaataaatttcagggatggtctatgaagattcagaacaatacaactgacttcacatcaatgaccttcaaatagaatacgtgcatggagaattgagatacgagaatggatttggaacaatcacatgttcatgtcaataaacttcggggtggtctatgaagaactcagaacaatgcaacgagcttcacattaatgaccttcaaatggatacgagaaggattcaaaacggaaccaaaaattgtaaaggttatgcctgacaaaaatgaaatttgtgataataataatcataatttgtaaaggaatcaaagaaggtgaaagttgaggagataaatagttgcatataaatggaatacattgaagataagataaaaagacagaagaaaataaatatacttttgggggatgtgaataagaaagactctgattcatgaaagaatcatgactctcattcatggaggaaaccatggctctgatatcattaaaaagtaaatactgataaattggaataataattcctctttcattcattccattctcttctatatttttcctcgacatgatgttcttatataagaggaaattcaacaaaatgttaataatacgggataataacaaactaaacaaactataacaacctaacaaatcctaacaataatttgaaatttaaattatacaattcaatacttacaaaatattgtaaccctagcgatttcaacaaacgtaaggtcagattattattattatttatattttattatcttttgaggagatatcatttgattccgtactaattggtttagcttctatctatttcatgtgctcgaatgttgaatgttcttaatcttcttatggtcaacgttttcattagccttgatgttaaccctgttggtttaaatttcatccttcatttgaaattgtgttggggttctggtcatagtaactataccgctctcttcgaataaaacaaaacacggctcgttcattgtgtgcagttgagacacgtcttaatacagcataagattcaacgaattgcaagttgcaactgtaatccaatcaccgcaaacttcttttgacatattttcttctgtaattgtatataaaattaaaattacttagctcatgtgcatttaagagaatgagatattttacgtaatcttactcttagcaatgcaaaaattttgtttttggattcaaacctttcttctgtaattatatataagtaaaaaaaattaacttgtatcttagatttaaatataagtaaattcaactatttttatttttatttaactatattattcttaaaacatcatttattttgttgtgccaagaagaagaagatcaaacacactctcacagaagtgtatcactcaagcttgatcagaaaaaaaatctcagagaaaagataaagaacacaagatcaaagagaagacagatttatatgagcaatgtgctcatgtttcaacaagctatattctcttattcctgaggaggaaaactctcaatgataacaatcgttcatctaagacagagatacagattttttttttcatcctggcagagatccttctctcttagcttcttttacactgcactctaggctatatacaaggaatagaagaactattctgatttcctagctaataaccaacttaactgtcacaacagaaagttaattaggaacagctttccaaaagtaactaactagtcatgattgtttgagaaccagcaaacaacatatttaattgcaaattgcaatccattttcaattattctttttatttataataataaattctaataaagaatattttatgaacaattttatattttacttaaaattattaaaactaaatagcatcaactaactttttaaattagtgtaaaattaattatttttacttatatacaaataaaaagaaatataatcttaaattttacaaagacttccaaaggcaaatgacatactatgaatacatcaaaattgagtagctcattaagttagaataacaagcatttatataaaagtataacaaataaatataaatatacagtttggactccagaaatctcttagaggatggctgcaatgatttatcctttgaatcttagatacaatgtgtgtgtgttgagagagagagagagagagaggaagcatgggctcaaagccagaatggcatacaccatcactgtcgccagaaaagcaaatcatggaaaaaatatcatttaaaaataaatcacctaaatttccagttttgcaattggccaagtacatatagcattcctgacagctttagattaccatatagagaaaaccaagccctctgaagatttcagatataaaaccgaaataattttgttgttggcatttcatagtgtttgtcactttaatcctatcattaaaatttcagagccgctctcttgaccaggttggtctggttctaaaattggacactgacattgtttttcaatttctctaattatttttttgccagatattgcataaaacatatcatacatatacttgataacccttgtcaggacagtatataacctccaaccgcacaccataaaatggagaaggaataaggggggttcaagaatttgcgcaagcttcgcaattttcttatattggaatgctaagaaacctttaatataatctgcaccaacaagtatgtgtaaagttgtttccattccatcatggaagaatgaaatatgaatgagataattaaaagaagacaggcaggcactcattagaaatttgattgtctaaatgtataaaattaaaccatcaactacaaatacaattttatcataatttagattaattgaagctaattatcgatgtggaacaatcatccagacgggggcatggttgacagaagattaagaaatgagaaacacgaaattcaattcaatggacagatagactaattcttatttggcatactcttctagcttgccagaattatggctttcggcaatcttcagaatcaaggacttgtatgttatttccgggtttaccaaaaaaatagttgagtgtcttagaaaaactaaatacctttgagcccaatctaaattgggccacccatattatgcccttgtgtaacaagatggattctgttattaccaccccttcttttgcttttttctctccatattttgtttgttattttttttcataccactaatcttaccccttcatccttgtctggctcttacacgaaattgagactaaaagctataggtctggctaattcactatcacaattaaacaatgtagtggcagaaaaaggaacatgaagatctataaatataagtcaattataggagctcacaagttattgttgcaagagttgggtattctctttctaaatatgagcgagacacaatgttttacttctttgatatccaagaaattaaagaggatacaaggaaaatacataggctggttatggattttcttgtagtggggtatgatacccaagtttaggaccaaagggtgtaattatgaagattatggaaaggataatccttgatgtagcaatggattctttgtaggctaaataaatagaagtttgcaatgttcgagtaataatcgagttaatccgcaataccattgcttagccagacattcttttcttagaaatgggcgttgcttggagtgtccacctattaattgcaatggtatctcactgattatgatttctctaaagtgtctttatttgagatctggtgttacttttaatgggtctagactatagtttcttccatagcaactactaccaaacaaagaatttatttatttattgaaattgaagtgaatttggcatctaaacataaaagcctcaaatcaattattatcctaatttgaataaaatgttattagataagaataagatatatatatatcttatcttattattttctattgtatttgattttatataaacaaccatcatattatcaatcaagcaaattgcaatctacagcatttagtatatcaatttatttatagattttgttttaataattttactttcttaaacttaattaaaataaacaagtgagaaaataaatcattaatcagatattttctacacttattttcattgaatgcgagcttataacttctttgttgtataccgcattttaaagaactttttatattaaattaaatattttgtttgtcttcctttcaaaaacaaaatactctctttgtctttaaatattagttatcagatcaaaatagttttaaaattattttaatcaacatttaattttcnnnnnnnnnnnnnnnnnnnnnnnnnnnnnnnnnnnnnnnnnnnnnnnnnnnnnnnnnnnnnnnnnnnnnnnnnnnnnnnnnnnnnnnnnnnnnnnnnnnnnnnnnnnnnnnnnnnnnnnnnnnnnnnnnnnnnnnnnnnnnnnnnnnnnnnnnnnnnnnnnnnnnnnnnnnnnnnnnnnnnnnnnnnnnnnnnnnnnnnnnnnnnnnnnnnnnnnnnnnnnnnnnnnnnnnnnnnnnnnnnnnnnnnnnnnnnnnnnnnnnnnnnnnnnnnnnnnnnnnnnnnnnnnnnnnnnnnnnnnnnnnnnnnnnnnnnnnnnnnnnnnnnnnnnnnnnnnnnnnnnnnnnnnnnnnnnnnnnnnnnnnnnnnnnnnnnnnnnnnnnnnnnnnnnnnnnnnnnnnnnnnnnnnnnnnnnnnnnnnnnnnnnnnnnnnnnnnnnnnnnnnnnnnnnnnnnnnnnnnnnnnnnnnnnnnnnnnnnnnnnnnnnnnnnnnnnnnnnnnnnnnnnnnnnnnnnnnnnnnnnnnnnnnnnnnnnnnnnnnnnnnnnnnnnnnnnnnnnnnnnnnnnnnnnnnnnnnnnnnnnnnnnnnnnnnnnnnnnnnnnnnnnnnnnnnnnnnnnnnnnnnnnnnnnnnnnnnnnnnnnnnnnnnnnnnnnnnnnnnnnnnnnnnnnnnnnnnnnnnnnnnnnnnnnnnnnnnnnnnnnnnnnnnnnnnnnnnnnnnnnnnnnnnnnnnnnnnnnnnnnnnnnnnnnnnnnnnnnnnnnnnnnnnnnntttgttaactctctcggttagatatttttaacttttttttttcccgcttttttcatggaaggtttattccacacactatcactaaaaaatatctctcttaactatttgaaatacggctctgttattattattctactgctaactatcgttctgttatctttacatgtatacttgatatcttcattaatattttatctttttttacattcttgcttatcttaacttttcatatcttttaatatgctattttcatctttatttcaaacttcaattcaataaattttaaaaactatcaataactacaacaaattgataatagtaacttattgagcagaaacaaaaccctaataagagactcaccaatacccttccctatataaataaagacccgcaccttattctctgaaagaaaccaaagtcttctttgcttctgaggctcccctcccctctctctgaaatccccaaattggttgtgaatggtagaaaccctagtcattcgatttgatgctctctcccttttgacatcaagggtgagcgcattcggttcttgcaagcaagcctggtactaccgatgcctcggcctcgacccctgaatttgaacaattcataaccacctttcttcattcattctcgattttccttttcgactcgatttgttgttgtttccttgacgaatcatgacgatgagcaagcagaagaagaaccagaacgcgaggaggctgttgataaccatcaatgtgctggggagcgcggggcccattaggttagtggtgaacgaggaggagtttgtggcggcggtcatcgacaccgcactcaagtgctacgcgcgtgaggggaggcttcccgtcctgggaaacaacaacaccggtttcgtgctttattgtccccatcttagatctaatggtacctttttcaatttctcaatccaaccctctctgtttatttatttggattgccattttttttaaatcttaaactgaattggagaaattggtgcgttgtttgtggttgcgagatgttttcagaaattgaattggacagattgttctgttgtggttgcaagatattttcagaaaattgaattggagagattactgtaaccgtctggagtcatgaaccatgctaataatctctgtctagtgacatttagttgttttattaaaaaaaaaatcatgaattgaatttttgttgtgtttgagacatgaattgaaattttcggtgaatttctatggtatgggcgtgttttaaaaaagaaaactatgagtttcttaggtgtttttggtggtattctcctattagattaatctttcatctaagcgatatttataaataaaggtctgtcttcatgttcaactatgttaccaaagtaaaattctgattagagaacaacaccaaaaacacataagggctaaggaattagtacacatctaagttttgtctttttaggtccttttaaaaatttggctttttgtattgggtttgttttgttctgaattgtgtgtgatggtgttgaagctttgagtccatgggagaaaattggatcgcatgggatgaggaatttcatgctgtgcaagaagccagaggagggtgtggcggatgtagatggaagtacagcactttctcgcagcagcagggggagtaggagctggaaggcttggttcaacaagttcctcaaactcaaggtttccacccactaatgaataaagctctctgggaattgaacatgatgccttttgtggttaatgccactaataatatcaataatatgtggtatttcttttggttgtttatgttctcgctagccggagaacccctctctttaggaaattgttcaactttgacatttagattttgattttgatggaatagaataagttttgattcctctcttccttccttgtcattttttattcaaataaattaaacttaagatagtgaatgcgagctaatattccaagtatattctcttctctttatgttgcactgaaacgtgtttgttttttatcctctcattggtgtatggcgctggttatggttttggcaattcaaaatgtatttgtagtcaacaaagtgtcagcgggaaactttcttattatttatcttagaacttagaaggtgctcatccacaatacgcggtgcaaggaaaatgcatttgagcagtaaccctgggtttgtaattttgcttgctggcaagttagagatgattttggaaaataaaaataaaaattgtagagttgacaaaaaaaaaaaaagccctgtttgtacaagattttaaaacaaacgaacctctaatttggcttccaaaagcaattttccgtgttcataaagttgccgaatattaataatttaatacaaagagtactctaaaacaaagtatccaccaaagaaaagctttcttagcttttgcttgaaagtggtttatttttaattcagaaccaacctaatgctaagttatgagataaattaatgataattaagataacaatgataagttaataataataaagatgttttataacctaatgctacattgatcggtgcatgttccctagatacatctatttttaattcagaaccagcctaatctaagttacgacgatgataagttaatgataattaagataataatgataagttaataataataaagatattttataacatatttttttgggaatcttttagaaatttgatagtatattatatttaaatttaaatttttagatattttaatatttaacgatctattatctttaattttaatggttattattaattattttcatgttttcataatgttcttatcttattcatattatatatatatatatatttaaaaatatgtaaatgcattttatgttattttatatttattaactaatttgacaaaaaaattatgaaacatttctatttcaacaaatatctttcagataatttttttattactttcagttaatttttcaattttaaacttattttttctttggtcaaacaccctcttagttgatttgttttgccgaatagatcaccgaattagagatgtatattttggtgctgctacattgatcggtgaagagaagataccactttttaaacaaattaacataaaatgtagagtttaataaacgcaaggctcaaattaaagaagagatggtttcagaaaaagatcaccccatgatttgagaatcaagaaagtgacgaggaccgtcctccagttgcaccaaaatgtatgttttaaatttgagttatatgcaaaataatgagtccttcttcgatattagtcatgtcttccacttgtagataacgaagttttggaattgaaagttcccacgcaaaggaagagtgggggctacgtgtgtggttatatattgctatcaaagtgtgtgcatgatcatatgattccattctactcaatttcactacggccatcccttttgcgaatgcatgcatgatgatacgcgaatctttgagattgttgttttcttttgtctatgcaagttacttcacctatagcagtatatatgcatggtctnnnnnnnnnnnnnnnnnnnntttttttttttttttttttttttgtgtgtgtgatagggaaaaacattcttttcttttaaaatgacatcatatcaaactatcgtagaaaaaattcatgatacaataactcgttttcttgcttattatctaacggaattctaacttcacagccaatattaatcgcatgtgatgaaacaagaatttttaaagaatgtaatactatatgaaagacgccttaagttgttttctttttttggtaatgattttttttatcggtagatattagtttgttaaaaatggtaataagtagattttttttttatcggaattctttttgatgttgcttgttagagtttgatgatgttgatgattagagtgattctgtacgtatattcagaattgtttttatttatttatttatttgatgaactgttttttgtttgatttccatgacataggattttagatggacattgatcagtggtgataggaggggaatggcaatggtgtgtggtgatgggtcgccggagacggtggaaccaccgaaaaggagaaagagctgctagaaagaaagtgagagaaaataaaattccctttgcacatcgtctaaatttgtatatattaattagtttttgtactttgttggctcaaaataaaactcccattgcaaaattcttaatgcaccctggtaccttcatccacgcgatcaaattatcaacatcaaacaacattttgatacgatacaaatttaatccagtgaaaaattggacggatattacttatttgtatacatctcatgttaatattgagtaaccatggctgtatacagctggctctgtaaatggtttaaggcacccatttgtgggctcttgcaccatggtgcaacttttttaaaaagttacaataatagtatattttttaaaaattataaaaatggacaaatcatactttaaactacgattttactagaaaaaaaatcgtacttcaaagcatgattttgttcgtcataaacttattacacgtatttgggtatattattttatttttattttattaaaagttgaaattatatgttaaaatgcattttaacatattttttaattattttagaaattatattttaatatacaatttcattagaaaaaagaaaaaatactaaaattgaaatttaacataaaagttcagttcttaaagaaaaaaatattttaaataaataagaggtgaaataatactttgatatataattttttttattgtgaaatcgtatatgaaagtaaaatttattcattttcatgaaaaattttaaaaaatattcattatgctaattttttttaaaaatcgatctattttcgtaattaaccctccatctgtgcatttctttattatatacaaatacctttttttctgattaaaaaaaaaaattgtagggtcaccaaccgaaagaaatcaaagaaaaagaagggtacggtacgcaaatcctttgtacctgaactcttcttatgtcgttatctgtatatgtactgttaatcttttgcaattgggggtcattttctttatttgataatgcgagacactcacaattcggaggatttttttttttttgttgaactattcggtggagtttgacacctcctttttgaaaaagaaaaatattctgttttctgattacctaatatattttgtttaaaaattcttctaaataaaataaacgccaaaaatcagacattgtttagaaatttagtgtcctgatggacaacacttttctctatttatagtatagacaataatgtcaaaataattgcagaaagtaaaagaatatcttgaatcaagtagcttttacatttctccaaaaacacacaatgatttcccacgcatatatatatatccaaatactaaatgtaattgaatgacttcgagtgatccaacgttaacaagaaataccaacacttgatgacaacgccggctcatcccttttggcaaaagcaagctttaggacacagcttgctgctagtactctattttcaagtcctacaaaccaaagacaccaaagaacaaaagagaatttattttagtaacacgtgtattacaacttgtaatgttaagaaatatgaacactgagcaattccaaaattcacattatatgttttattattattattatcaattcaacccaagttaaaccaattaatgacttgtatgtctcttaacaagttcaatttaaaaaattaaaaatactggactagagaatttaagaacatgcatgagaaaacacaaaataaggtgactagaaatatcaattaatgactggtgaatatgattatcgcaaaactgacgacctaaattgactagtgaataaagaatgccatcttcacgcctatattgagtttggtttcatttacaaaatgacttttcagctaggtttatatagcagccatactccatatagagtttcataaagctccattgaacttgcaccatagattttgctcaacttttacaatatgaccactagcctcttcaggaactgcccctacaattttatgctagcccttaaaaggaactcactagggcctcataaaaagtcaaaagaggttgtttgagaaggattatatgtgggaagaatcctgacagtatttgaacagcaaagctattgactaatctacaactccattatgtaccaatttaataggaaaaattacttttatatataacccctaagttgtacaaactttatcttgtaatcttacacgtaaaaatcatcattttcagtccatgtaaaagtacttttgaatttcttttagtctcgttacaaaatatcaaagattaaaagataaaatttatatatcgaaaggaaccaaaagagatttaaaagtatttaaaatttgtgtaaatgtaagaataannnnnnnnnnnnnnnnnnnnnnnnnnnnnnnnnnnnnnnnnnnnnnnnnnnnnnnnnnnnnnnnnnnnnnnnnnnnnnnnnnnnnnnnnnnnnnnnnnnnnnnnnnnnnnnnnnnnnnnnnnnnnnnnnnnnnnnnnnnnnnnnnnnnnnnnnnnnnnnnnnnnnnnnnnnnnnnnnnnnnnnnnnnnnnnnnnnnnnattatcccttagaaaaatgaatagtattattaaatacaaccatctcttaaatcatttaattcaatgagtgttttcgaaaatttaaatttataagattattaattagaattaattaatttaactattttaattagttaagatgaattagaattaattaatttaactattttaattaatttaatatcaaatatctatgtttacccaaaaagaatatcttttacgggtccatgcaaatgctagtacatgtcgtattcatcagacacatcagttttagcatatttcgagtattaaaaaattcagtaaatactttattaacaataaaaatgtaaatgttcaaaaaaaatattttttaattagtaaattatcattttaatgatgatttgtaaatattatatatatatatatatattttttttttcttgaagatgatagacttgaatacatttggatttgatgtgaacctcacacctgctgtgattggtggtgtcgtcttgttttgtgtttatgaattagggatctttaacttcaaagagatctaaaatgaaaataaaaaattgtttaaaaaaattcaaaattgaatcgaaatgattgcttctcaatttgtttgaattatttgtttctaaaactaattgatttgttttagtttgttttgtgtttatactaatatttatattattttagtcttatgcattttatatgtatataatttgagtctcatattatattgtagtgctaagtatataatatttatataatgtatatcattttttttaaagattttttttaaaatatgtttggtttaaaatggatacaaacttgctagatttttaatttgttattagtaatttttaaaatatattaaaagatgaaaaaaaaagtatatgaattttaataaaataatattttagtaaaaattatgaaattgaatcaaatcaaattgtaaaatattggtttggtttaaattttattttaaataaaaattgaatcaaatagaattacatatatttttttaatttgattcgaatgacaccaaattgaattaggaatgcccctattatgaatgtatgttgggtcttgccatgcttatttagttttttttggcttatcttatattcttattgatttgagatatttaacttttaggtccatgatccatgattaaatattcaagtgnnnnnnnnnnnnnnnnnnnnnnnnnnnnnnnnnnnnnnnnnnnnnnnnnnnnnnnnnnnnnnnnnnnnnnnnnnnnnnnnnnnnnnnnnnnnnnnnnnnnnnnnnnnnnnnnnnnnnnnnnnnnnnnnnnnnnnnnnnnnnnnnnnnnnnnnnnnnnnnnnnnnnnnnnnnnnnnnnnnnnnnnnnnnnnnnnnnnnnnnnnnnnnnnnnnnnnnnnnnnnnnnnnnnnnnnnnnnnnnnnnnnnnnnnntatataaaaagcaattctttatggaataatcaactactctttcagattctatttataagactcaatcaaaattaatgttttatcttttcataagataaatttataatgtttgttatattaatttattttataatatattatcctaaataaaagaaagattgtaatatagaaatgattaaaagagagagaaaatggagtattgttaacgataatagtagtaatttgaaagaaaaaaaatacaaattgaggacatatttattgatattaattaaattaataatttttgttaatgtaataaattagacaattaaatcttataaatacatgagaccacaaatagtatatggtttgataatcaaactatgagtttaatgatgatatagtaacaaaataaaatggttttacattttcaactaatcataaataaatgttgttatgatttttaaaatagttattataaaagtgaataaatttatcatatataatagattatgattgaatgactatgtaaaaatttttaaaatattatttactgcaaaaattaataacagggaaacacaaaatttaaaaaagaaccaatgatattttagtaaataaatattaattaaaaattatgaaaatatataaattgataaatatacaaaaataaattcgtactaaataggatttttcaaaactttttttacacttatttgtacatcacctattttctcgtcaattatggtgttcatatttgccgcctcaaattgtcttaagaactaaatattcgatttagaagcggcacaaatcgattgcctcattaacaaaagcctaaaaataacatattaagttactattttttgtgttacaaattttaacatatatatatatatataagtaaaattctttcattattatagtaatgtactataagaaaaacactgtctctgtatcttacacaaccaaaatcaactaaaaacttttattaaaattgtttttggaataattggactgaattttggaaaaagtttttacaatccaatttacccctcttggatttgcttgtcatttgtctaacaagcaggacatgacaacccaatgtcatgttgatggaacactatttacagactataggtcgataatggttaaggttgccaaacagagcaaggcctaaaaatgctacgtgacaaatgagaaagaagaaagaaatattttttttaagttaaatattaaaaataatacccctataataatttaagtaaaataaaagaaacgattgagatttttagtcttaaatttatgtataggttgctaataaggtcttaaatttttgtataaattactaatgtactacaactaaaaaagtttgaacatattagaaagtagcaacctctctctctaaatatatactaaaaaactgcatcacgattagttgaattagttagcagtgaaacagataacaaattaagtttaaatgatgggatgtgaaaagcatttgtgagtataagtgatgttgaacaatgtacagtgactatgtgtgttattacaggcgcttgatttttgggattgaagggagtcgcatgcatcatcaagaggcatcagagttaatgagttgaatatgggagtgaaatcattcaactagaaatttttattttacccttttaccattttatttaaacaattattgttggtacaacaagtgtaataactccagcttattcaatttttataatgataaatcaacggactaaaataattgagtttctatcctgcatcatgataagaatagaacgagttcagattataaatagttaatttgagattttgtgattgaaataaattgagttggatcactttggatgaaacaaaaacttcttgtttatattagatatgtgatgatcattattttaaattgcgattgcagttgcagtaagtcagaaaacttttgcagcattggaggcaattgctggaaaatgtggttgatgcaatagcaattgcagttggggtaagttgaaataccttaatgttatggccacaatttaaaacgataatgattaagggtgtgcagttgttggagggtcttgatgtttagggagtgtaagatcatcacccaaaaaggatttgaacaagttggccataatttatccactaaattagtagtgctggttttgtttataaggtatagggttatatagctctaatcaaaacaaccggttttggtttttatcatttcccgcttactgttttaccttgttaccctatctctatatgcatctatactaggcttaatttccatggacagattccttttaaaacaatattgtcttttgggcaaagggatacaggaatggaaaagttataaagtgtatcatgtgataaacaatattggaacttatatattaataatttgtcttaagagattaatcaattgatacaaaatgagtatgttcttccaattaatcagtgaaatctggatcaatgggacttgttgatactctctgtcggttgttttcagctaacaggataggaatctctttaaagtgatttaacaatttgttgatgatgtagttcactttctagataagggttatgaatattctttctttcctcaagattttgaagactatctctagtttgtaggttaagtttgcttgctttggctaatttatcatgtggaccagctactatctaattttgtggcagtggccggtttgtcaggttctgcagtagtttcttactttattattggagttactttgggtgtggtaatatccactgatctttcgaggttatagaaatattctatcccccaaatatgttccatttccctatcccaccagttagaattgatcgaacacttcacttgagatgttttttgacccacccatgtctatttagtaaaatgtgtatagttaagtgtgtttggtttatcattgaatgtgggaaaacaatcgatggaatgaaatgacatgttagctttctggttatgttctttggaaagtatgaattcatttttgcattaatgcaaacaagtttccaaacttgtatagatgcattttaattatgtcgaatatttgagagaaattaattatctattggtggaacaatctgagtgaaggtacaatgtaagtacaaattggactcttcataattttgaacttatctgttgtcctgttaacccaagacagtgggacactaattttgtatttataaaatggactcttcataacgttccatagcaaaaggcaagaaaaatcaaattaacttttttaactaagtgtataaaatcttactgatattaatacacagatcaatgtacgtatgaagaacatataaatataagttctaaaaatcatttgagatttagttattagagcatctcgtgctaacatgcacagctcactgatgttctgtccaagtgaaggtacattgtgatacacatcagttctaaaccaatagtttcgcatatggacttatgcaaaaaggttgccctaagaggaatggttattagcatgaaaagggtagtatccatgcctcgaaggttgtactataggctcccgattgcagcctttttagcattcattgctaaataaagagtgtttgttcaatgctcgtctcaattctggtttagttctatcaggttcctttccaacaaatgacaacattcttaatttggatatatatgatatctggacagtttctcgttagagtggttagcacttcccttttcagttaattcacacacaaataaaataaaatcgcttgatacatatgatgtgattaatataccttgatttcatcttggttttttacataaaaaataatatatgaacagaaagtgaataaaatctgtttcacagtgttacttattatgataagttagttaattttattacagatatcttaaaatttaaaagtgattaattaataatataaaaactttaatttcaaaatgctaataacatttaattagaatatttgttaatgatttttagagctaatgctttccttgacataagtctggaatttctttgtctattgagcatttgatagagcatagaacccgtttgttaaatccctaacgggttttgcagcgggcttcagatgtaatctttaggaacccaatacacattatttcaaaatctgatataaaccatactatataaaagatattatttgtgggctgtttgtggcctttttattcttaaagaccaaagaactataataagaggctgggagtggcccaaaaaaaatgaaggaaaaaaaatcatacttttttcagttaattaagtgtgttttttgtttgactttaaagaattaattttgcgtccagaaataattttaaattaaattttacatatcatgttacagaagattttaaaattaattctaagttgaagtttccttgagtaatttgtatgttaaatcaaaaaatttatactgaattttattcttaaattttactcttatcttgattctataatgaaacatccaaacataaatcaagtaatttcaaaattaattttaactaaaatcaattttaccaaatcaattataaatctcttgccttgtgatttcgctttagtcgagtccacctaagttgattcacatggctataattgattaccaatttgtatttattgctcttccttgcattaaattcgtattttttttgttttttactttcaagggcagtcttaggttncaagggcagtcttaggttttccattcaacaatagagataattgtacttgttctagttttttaaaaacactcaccacccctacgtaacattaaagaaggggtgtgaatgtcactttactaagtaaaataagggaaagtgagtgtctatttaaaaactaagagtgtctatcattttaaaagacttcaaagtgagtctaatctctcctaaattattttgtagaatgttgcatctttgtatttattttattcaaaaatgcattcagtatgcagaaccgtttaaatatggatgctaattgcttataaatgactacaatataagtgtgtgagttctctgcaaagcatcaatggggggacctgtagaaataatttggtcaagtgtacaaaatatcaccaaagttataattgatgaaatttaagttctgacctctgacttcctcaatgtttttacaagaaatcagtattacaatatggaaaggattctagggattggtgctgagttttggtttctgtgctaaatatagatactatatgaattttttgcatttatgatttataaagtgttgtggactggtctttcattctttaaatgtcttgttcgaaaaagaaccttggtccggttattgtgggacactcaactgtgaaacacatgttctgttcaatgttataaatgcctacagcaccacctatgtaactatgtctaaatggtgcatctggggttactagtccccctatagcgactgaagcatctggtaggacagaaacgtgtttctagtagtatgttagaatgttcttattttaatattattaggtaattgatgctacaaacaatggaatcaatgtgtatgaggaccaccatatgtgaatcacacacatttgttctcaatagtagatggaaggttgaatctggattgaaatttgaaagattctgctcagtcagtccctaagaagaaaatgaggctttaattttcaatgtgccataactctttgctgacagcgagtgtgaatgtgactccttctcaagtatgcatgtataatcatatttggaaaaacagctgttatgatcgtgattcgtgatatatatacatgcatgtatagcaaataatgaagttgtttaaattaaatcaattgattttctcgtagtgaatataaaattatgatgcagtctaaatccattaaaattttttcatcaactcgtataactacttaatttagatgagtctaaaaacatactattctgccatatataatataccttttgctttggattgtataggccaatgactgtaaactaggaagagtgaagagtgatttatgaatattgaataatgactatggcgactctttgaatttagttgttttactgtgcctcccaccccaaaacatgcaatgcatttcatagctaccagcacagtcatttgtactggagaccctcgtggcaaaacaaactgttgaatccagtggagaaattgttgttttgattctgttcagcaagttggaaatttattccttgtaaccattttttaaattgatccattcaaattatacctattcgactttcttaagttctgaaaccataattttgaggcctcaatgagtacaatgaacattgtaaagacatcaatgtttgatatgagtgatatcaaacatatgatatatatagacacaattgaacaagtttaccaactacctggtgaatgttattgcctcagtgactgtgactgattgtggttggttcttactttttactcccaagtgaataatgtaagttttatacactggatgcactgtggtctttgctgttgtgtgacagctgttttgattgaagtgtttccttcctttctaactaaaaattaacataatattaggtactattatgagcaccaacaggcttcagttgttgcatatgtgacctagaaattgtcatgtctggaccatgttcagttattttagtaaatgttctttaaaattgtctccctgctaaatttctcttcctctaacctcctaggtgttggctgcatcagcatggcaattagcatgaactgtcaagaggggtagtcatccatcttgtgtttttgtgcaccagaggacgtttggagatgtaggcacaagtcacttggtgttttaaaagtttttcacaccatagccatgtttggcttcgcgtatcagacatggtttttcacattccggatttgatttacagaaactaatagttatagcttctacatctcaaacgtaattataagatgatttgatggcgaaagaaaaagaattgtcaatgagttcaaatttttctactaacaagaaactattaactaacatttattaataaaagaatatcttaaaggtaatttctttattctcaaaatgtttccataaatgctaaaagttacgttggtagttgcgtcaatccatcactcccagtattttactgggccaaagagcaatacatgttccactaataaatcttatatcttatatacagactacgtgcaaagctttatgtatgcacatttttttatatataaatgtcgatttgagtgtaaaagtagtattcttatatcataatggggtaatttaaaaaaaaaattattataaaatttttaaaaattacaaaaataaataaatcttactttgaaatatggttttattatgaagaaatcttgtttcaaagcacaattttattggttaaaaaatcattagactgaaatcatatatctacatataatgtcagttttttattttattataaggtggaatctattttaacatacaattttaacatttttttaattattttaaaaatcatattttaacttgtgattttaacatattttataattgttttaaaaatcatattttaacatatgatttcattaaaaaaactaaaattatattttaatatacgatttcagattttagagaaaaaaatattttaaacaaatgaaatatgaaattatattttaatatatgatttcttcgttgtgaaattgtatattaaagtatgattttcataatttttaaaaaaaatatacattatgataaaaaaaaattaaaatctatccatttccttaattaaccagtcaaagtagctttaaagataattccacctttatcgtcgaattggaccagcagagtcctcatctcacagatatacatctagtaaccttaccaatcatttgagctccactagatcataaaaaatcaaaatgttaaaatatgtcttttttaactcataactataaaaatgtatttaaaaaaataaattttttagtatggttttattctcaaaattaaaatgtattatttttttttacaaaaagtattgaatattcaaattcaaactacatccattactttattttatcaattatatgtataacgaatataaaaaaacatcaaatttacaaatttcaattttatgagcaccaaaaatatactaaatttttaaccaaagaaaaaaaataatattttaaccaaagaaaaattactctttacaagctctgctaatttcccttccaatagttttaagaaacgatgtatttttaagataatatatggttttatggtatttttgctcttcccaattgtcaaatgtcaataggaccactttgtcaatttcaatattattaacccaaatgaccttgatgatagatcgaagaatcaagaagaattagctataggagatataaaattagttatttatgtgaagactattttttgatagattttatattgttatttaagattgaaaatttttaaaatttcttttatttttctttagtaataaatattattttgaaattttaaagaaagaaagaaaaaaaattattttttaaataatatatagatattgagactcttttataagaattcattcttaatatttgatattttatgaaaaatctagtgaaaatcaaattttaagttcaaaaattttattcaaaatttagcattaaaaatattctaaattgattaaaagaataattgcagatccaatcgttctcgctaacaataattaaaattaagaaataatatttgtcaattgtcaatataaaaaaatccggtcttaaccagatccgaaagtacttcatgttattgttctcatcaccgatggactagggaatagggatgtctctcatctgtagaactataattgcacttacaaattttgtatagatttagcgtacacataattaatcaaagatcaaaatgccacgtagtacattgaaactttgtacttttgagtgtacaaatgtaaagtgtgtttgataagttattaataatttatttaactaatttatgaatttgttcaactaaaatagaaatgtttggtacaaatttgttgtactagcttaattatagcctttttcatataaaatagagtttaaatttatgacattattattattattattctttcatttttttatctccaatacttttataaatgtcctcgcttagcatctcatttcatagaacattatttattttaaattttttaatacaatatttgatcattaaacaaaaattacaaaagttttatataaaaaatgataagagttcaaaatagttttaaacattgtcaatcttataatttaaaaagaaaaggttaacttaaaaggttatgagctaaggatgcggagagtgcatgggctttactcttgagctcttatcataggtttataatgtattcagttaataaaaatatttcgaatgaatatttttctttaatgtagtacgagttcgacagatatttatgaatatgtatgggtacttgtgaatatctattagtttattaaaaaataaaagaaatgtaaagaatattttaaaaaaacaaattattggaaaaaattataatagtaagtactaattaaatttttaatattaattaaattaattttttgcaggaaaattaaattttatttaaatagttaaaagtattttaagtaatataacgtgttggttatttattgtacgggtatttcattatccagtctcatcttgtttaataaatgagtgtaaaagtaaaacacatgctttctctaggaaggtggaaaataaacttcccaaattcattctatatatagttttatttatcggatatagataattaattgtgacatccactcatcctcacatactagaaaaatggggaatgcatatttttatgctaaaatttcacatcacattgtcacgcnnnnnnnnnntcattctatatatagttttatttatggatatagataattaattgtgacatccactcatcctaacatactagaaaaatggggaatgcatatttttatgctaaaatttcacatcacattgtcacgcgaaaattctagatttaacttctttaaaataaaattgtataaaaaagtcagaatttatctcagaaactcaacttaatttaaatcatcagcaaacaagtcatttcttctcactttatgtatctccttcctttagaagagtttagttgaagcatttggtttatctataattcccccttcagaaacattaaataggtcaggtgctatcaaatttatgaagaaagataaacataaaactttcatacgacaaagtgatatagaatttattaatgaaaccctgcaggaaattaaacagcgagagtggcaaaattttgcattaaggacaacacattcttcatgtttcaagcacaattcatttctatatttttttatccgctaacgaaacgtggcattctttaattttattcctgcgtccccaaaataatataacgaatgcacactacaaggaagtttagaataggaaacaagtatccgttcgtacttcgtacaatgaagtggataaggatgaacaaggtctcccatgaaaataaaatagccatctgggtatgtatggatggtgataaaaaaaaaaaaaaaaaannnnnnnnnnnnnnnnnnnnnnnnnnnnnnnnnnnnnnnnnnnnnnnnnnnnnnnnnnnnnnnnnnnnnnnnnnnnnnnnnnnnnnnnnnnnnnnnnnnnnnnnnnnnnnnnnnnnnnnnnnnnnnnnnnnnnnnnnnnnnnnnnnnnnnnnnnnnnnnnnnnnnnnnnnnnnnnnnnnnnnnnnnnnnnnnnnnnnnnnnnnnnnnnnnnnnnnnnnnnnnnnnnnnnnnnnnnnnnnnnnnnnnnnnnnnnnnnnnnnnnnnnnnnnnnnnnnnnnnnnnnnnnnnnnnnnnnnnnnnnnnnnnnnnnnnnnnnnnnnnnnnnnnnnnnnnnnnnnnnnnnnnnnnnnnnnnnnnnnnnnnnnnnnnnnnnnnnnnnnnnnnnnnnnnnnnnnnnnnnnnnnnnnnnnnnnnnnnnnnnnnnnnnnnnnnnnnnnnnnnnnnnnnnnnnnnnnnnnnnnnnnnnnnnnnnnnnnnnnnnnnnnnnnnnnnnnnnnnnnnnnnnnnnnnnnnnnnnnnnnnnnnnnnnnnnnnnnnnnnnnnnnnnnnnnnnnnnnnnnnnnnnnnnnnnnnnnnnnnnnnnnnnnnnnnnnnnnnnnnnnnnnnnnnnnnnnnnnnnnnnnnnnnnnnnnnnnnnnnnnnnnnnnnnnnnnnnnnnnnnnnnnnnnnnnnnnnnnnnnnnnnnnnnnnnnnnnnnnnnnnnnnnnnnnnnnnnnnnnnnnnnnnnnnnnnnnnnnnnnnnnnnnnnnnnnnnnnnnnnnnnnnnnnnnnnnnnnnnnnnnnnnnnnnnnnnnnnnnnnnnnnnnnnnnnnnnnnnnnnnnnnnnnnnnnnnnnnnnnnnnnnnnnnnnnnnnnnnnnnnnnnnnnnnnnnnnnnnnnnnnnnnnnnnnnnnnnnnnnnnnnnnnnnnnnnnnnnnnnnnnnnnnnnnnnnnnnnnnnnnnnnnnnnnnnnnnnnnnnnnnnnnnnnnnnnnnnnnnnnnnnnnnnnnnnnnnnnnnnnnnnnnnnnnnnnnnnnnnnnnnnnnnnnnnnnnnnnnnnnnnnnnnnnnnnnnnnnnnnnnnnnnnnnnnnnnnnnnnnnnnnnnnnnnnnnnnnnnnnnnnnnnnnnnnnnnnnnnnnnnnnnnnnnnnnnnnnnnnnnnnnnnnnnnnnnnnnnnnnnnnnnnnnnnnnnnnnnnnnnnnnnnnnnnnnnnnnnnnnnnnnnnnnnnnnnnnnnnnnnnnnnnnnnnnnnnnnnnnnnnnnnnnnnnnnnnnnnnnnnnnnnnnnnnnnnnnnnnnnnnnnnnnnnnnnnnnnnnnnnnnnnnnnnnnnnnnnnnnnnnnnnnnnnnnnnnnnnnnnnnnnnnnnnnnnnnnnnnnnnnnnnnnnnnnnnnnnnnnnnnnnnnnnnnnnnnnnnnnnnnnnnnnnnnnnnnnnnnnnnnnnnnnnnnnnnnnnnnnnnnnnnnnnnnnnnnnnnnnnnnnnnnnnnnnnnnnnnnnnnnnnnnnnnnnnnnnnnnnnnnnnnnnnnnnnnnnnnnnnnnnnnnnnnnnnnnnnnnnnnnnnnnnnnnnnnnnnnnnnnnnnnnnnnnnnnnnnnnnnnnnnnnnnnnnnnnnnnnnnnnnnnnnnnnnnnnnnnnnnnnnnnnnnnnnnnnnnnnnnnnnnnnnnnnnnnnnnnnnnnnnnnnnnnnnnnnnnnnnnnnnnnnnnnnnnnnnnnnnnnnnnnnnnnnnnnnnnnnnnnnnnnnnnnnnnnnnnnnnnnnnnnnnnnnnnnnnnnnnnnnnnnnnnnnnnnnnnnnnnnnnnnnnnnnnnnnnnnnnnnnnnnnnnnnnnnnnnnnnnnnnnnnnnnnnnnnnnnnnnnnnnnnnnnnnnnnnnnnnnnnnnnnnnnnnnnnnnnnnnnnnnnnnnnnnnnnnnnnnnnnnnnnnnnnnnnnnnnnnnnnnnnnnnnnnnnnnnnnnnnnnnnnnnnnnnnnnnnnnnnnnnnnnnnnnnnnnnnnnnnnnnnnnnnnnnnnnnnnnnnnnnnnnnnnnnnnnnnnnnnnnnnnnnnnnnnnnnnnnnnnnnnnnnnnnnnnnnnnnnnnnnnnnnnnnnnnnnnnnnnnnnnnnnnnnnnnnnnnnnnnnnnnnnnnnnnnnnnnnnnnnnnnnnnnnnnnnnnnnnnnnnnnnnnnnnnnnnnnnnnnnnnnnnnnnnnnnnnnnnnnnnnnnnnnnnnnnnnnnnnnnnnnnnnnnnnnnnnnnnnnnnnnnnnnnnnnnnnnnnnnnnnnnnnnnnnnnnnnnnnnnnnnnnnnnnnnnnnnnnnnnnnnnnnnnnnnnnnnnnnnnnnnnnnnnnnnnnnnnnnnnnnnnnnnnnnnnnnnnnnnnnnnnnnnnnnnnnnnnnnnnnnnnnnnnnnnnnnnnnnnnnnnnnnnnnnnnnnnnnnnnnnnnnnnnnnnnnnnnnnnnnnnnnnnnnnnnnnnnnnnnnnnnnnnnnnnnnnnnnnnnnnnnnnnnnnnnnnnnnnnnnnnnnnnnnnnnnnnnnnnnnnnnnnnnnnnnnnnnnnnnnnnnnnnnnnnnnnnnnnnnnnnnnnnnnnnnnnnnnnnnnnnnnnnnnnnnnnnnnnnnnnnnnnnnnnnnnnnnnnnnnnnnnnnnnnnnnnnnnnnnnnnnnnnnnnnnnnnnnnnnnnnnnnnnnnnnnnnnnnnnnnnnnnnnnnnnnnnnnnnnnnnnnnnnnnnnnnnnnnnnnnnnnnnnnnnnnnnnnnnnnnnnnnnnnnnnnnnnnnnnnnnnnnnnnnnnnnnnnnnnnnnnnnnnnnnnnnnnnnnnnnnnnnnnnnnnnnnnnnnnnnnnnnnnnnnnnnnnnnnnnnnnnnnnnnnnnnnnnnnnnnnnnnnnnnnnnnnnnnnnnnnnnnnnnnnnnnnnnnnnnnnnnnnnnnnnnnnnnnnnnnnnnnnnnnnnnnnnnnnnnnnnnnnnnnnnnnnnnnnnnnnnnnnnnnnnnnnnnnnnnnnnnnnnnnnnnnnnnnnnnnnnnnnnnnnnnnnnnnnnnnnnnnnnnnnnnnnnnnnnnnnnnnnnnnnnnnnnnnnnncatctgggtatgtatggatggtgataaaaaaaaaaaaaaaaagtgggctatatatggattttaggaaactcataaagaaaaggaaaaccaagagaagcaaaaacgtggaagaatgggagatagatagggtgagaggtccaagcgatgttatggtcaaacaaagctcaaagggcatgcacaaacaattcagcattgagcaaggtcacattcaggtcccccacatgcttaactgttctaaccacacgagtgattcagacattgtccatcataaccaatgtgactctccacacacctaactcccacacacatttatgctgaggcaccgccgctttatcattcaccatcttaagttccaataatccatcttgtttaacaaacaccttgacttctatatacatctatgtatgtagcactaagcgcgtttatcaactgatacgagattattttaacttaacttgtagtcttgaattcgaatttgaattctcagcatgcaactgttttatcaagagaaaattttattgtttaataatttaataggctcaaacagaattgactttaaatggaaaatagatgtgatttatatgtatgtcctggttgtcaaccacagcttccacaatttgaagaattcgcataccaataatgtctttgactaagttaacccctcactcaattttttgcataattagttccatgatccaagagaaggccccagcaagcagcaattttggtttcacttggcttctctaattaccactcactcataattgttaaaaagattttatggagataccttttttttttctccatcttttttccttttaaaatattgtggctgatgtgtgtaactgaaagagacctcatattttctcgtcggtagaaaagggcgaggagaaaaagataataaaagcaacagccgcatgtggagaattaaaataggtaactgatgtgagcagctacagaaaactttttaagatcactcaacagtggaaatgctattagaataagaaaaggtgggggcccgaccaagtaggaagtaacatgtgtatatagtatatggttcattatttataccattagaaggtggcaaacatataccaagtaagatggcccaatacgtagaaaccaatatcaatatgagcgtgagtgctacatatagatctttcattcactgactcgtctactggcctgcaaaataaaaacataattaaatgatccatgctgatgaggcagtctcttttggttcatatgattgttccttctcaccctggtgggcatggagggaagtgtcaccttattgcatttttaagttttgtgcttgttatcactcaattattgttcaatttaaaatttttcctaactttaatcaatttgtagtttgtgatatgacatgggtcagctaaattaacatttgagtggttagaagcaatctatgtaggaatgaaatgaagatattctcttatcatttagttttattctaatggactgagtgcccggccaactgggaggggttaggctatagatactgatcaaatacgttactagttggaggaaattggaattgcaaattcacagagtctacacctgagaatgcttaggtcatttattgttttggtttaattactacactagaatataatagagtaagtagagtattccatgcgatattgatggttcattctgcacttgccagactgttcagatttaaatttgagggaaaataatttaaaatattagagaggggataagtctagagaaaggcaggaaaaaatttgcaggtttcctctgacagatgatctcaggaactcgagattcctggaaagtccaatactatactaatattctgcagctggctaagtacaatcaaagttatcactgagttaataaaggaattagccaatggtgattttgattcttgccttgaccaatgatcttatgctgctttatttaagatactttcttggttaggtatttaggggatattaataaacagcaaagttatgtacaagaccagttatcaccatcatcaatatacagaaaatcagatcatactatggaataaacccagatgattttgatataaccggcaaaggagagaaagtactgaaacttgaaaaggtggaaaaagtatggcaatcaatctgtaggacaataattacaagggaataaccattaaaagtgaaactttttaagggggggatagcattaggaagatcttggacattaaaaaagtgggtgatcctttttgtttttgaattataatttaatttaatttaaatttttcactttctgatgactgaactttgtctgacacaaaaggggtctcggctgagattgcagtaattttgttatgcaaaatacatgcgtttgcagttacagttccatccactttgatgctgtgtatcactcaactcttgaaatatatgccgcacaaggcaaggtgctttatccgtgctaatgcaatgcaacaagccgcggattctccattttggttacttgtctgtcataccaattcaatcaaagctggccggctccatggcccagacagagggctaccatcattcttaatttgacaatgatggctcatacccatcccattcatcaaaaaatcacttgcttcaaataaaaggaaacactaaaaatagattctaatttattatatcaccagcaagctacataatactactaatatattaattaaaccatgatcaataaatacacattaagccttttgatttcccaaccctgaaaaattacaagagatttccacccaacccatcccaaaagaaagccaagtaaaataaaatcaaggtttacaaatgaaaaccctaaggcaaatccaaaataagtaaattaagggttggacagagagacataagttggggcaggaaaatagataatggtgggtctcagtctcatgcaatcagtgctcacagctcaacatagcacatttacaaactgccctctcatccccacaagttcctttttctttttttctttttttttcggtgggcatgattagaaattaatttaaaaaataaaataaaataaaaaagctggttgaggaatcggcgagtcgactcagtgagcagcaaccaccggttttgcagcgagttgccacacggaggtggcaatcaagggcctagtgtgccatcccaacatgagacacccattgttctcttccactctatacccatccccacccccgaaaagcgcgagcaacatgctagcctgcttgtacgcgttcgaacccaagtgaaccggagaaaacccggtcgaaccgaaccgattccgccactggttcagcgtctcgtgcctttccacacggtccattccctcgcacgccaccacgttgcagatttgcttccctaagtaaacctccgacatggccttgtcgttcgggttcacaggcgaaccctccagcgagtcgaatagagttgaataatagtgcagtgactcggtgaaccggtcgacaaaactcagtccgttgtggttcgcttcttgctcgacgacggtgaggatctccggccgaatctgccgaacgacggagaggactttctccaccgcgccggggcgggcgaggagcttgtgaaactcgaagacggagttcaccgctacggactcgtcttctcggagatcgagcatggaagcgtcgagatcggcgaggctgtttgcgacgaagccgcggtactcgaactgcacgtggatcgtctccgccagctgcgcgagcttccaacctacctcctggaggtggtcggagttgtccgccgccggcggtccgattccggttagccggaaaaccggaggaccgtcgttgcgaagcgcaagggcttgcatcagcgccggccactgcatcccctggttgattccgaaatcaatcacgtggacgcggtttttcccttggaacgcttcgagaatcgccaggttcgcggtgaagtgcgcgaacttgaggtaaggacaagtttcgtagaagtgaatctgtagagaatccgagagagagtgctgcagagggacgactctgtagattcgcctcgcgagcgcttcggcgaagtaggttgcgactttcctcatagctccgacctgcgacaaggctaggaagccgatctgtttcaccagcgcctccgccacggcgaggttgttgttctccaccgcctccgcgcacgccatgaggctgtgcacgaggcggattccgttctcctgcaagtcaacgaccaccaccgcgcgcgttgactcgtctgttctcacgcgcttagggtttggttgcgcgtcgctaccacctccatatattgctttccccggaatagccttgagatcgtagtccgacgaggcggaatccttctcgggctcttcggaggggagagggtcaaaattggaaagcatggtttggagccagttggagatgtcggaagggttgtaatgaacggcgtcgtttgaaagctccgtgaggtcatcttggacatttcccatggcttcctcaagacgctccagcttctgcgccacttccgccatgtccgatgacctcaccttgtaacccaccaccgcaagaagctcgtccatgcctccttcttcctcccaaagattcgattttccgcttgaataaccgcagcttgaggtccctgcgttggaaccaagctgctcgcgctccctcttcatcctttctgtttgctaactcaccaaaccctctcttttcctttctcttctattctctgtttcctttctctactgtaactagttctactgcatctccctcacttctcacatgactcgcacccaaatatcaatcaattattatatagttataaaatagtagtatatgtgtctataagtacaatcctttctttttttaaaatgtcctcggaataaaaatatttaacctggaaaaaattataaaatatttcacaaaacgaaaaaggagaaaacgctcgtgaccgagctcgaaccccaatgaaactccacgcaacctcctctaacagataagatccaaaaaaatgcatatttgtgttttactttgtttccatttctgtgtttcacttaatttaacaaataagtttttattgctgcttgtaaaaaaaaataactacttgtttgattaagtttaataactatttgaaatattgaataatgtaataatatctaattaagattaaattatttatttgagttgacggtataccagtctttttttatattttgcgaaggataatagtataacatattaacatttcccaaagagaaaaaggattcaatatcgggaaaatatgtttggactttgtgagtttattttattttataccactgcgcgccgctaatacttcattgttacttccgttaaaagcttaaattaagtacacgcaatacagctatggaaattgtatagactctacattactctatttctaggcgatgatgagatagaccttataggtgaatttggctacatggtaaggaccatgagtatcttcattaattgctaattaacattccgtagatatgcttagaaaaatggaaaaatagtagtgtttagttatagatgtttatttctttaattcatttatgatcttagttttcatatttttttaaaggtaaataagctttattttaacattaaagtgaatttgctctcgttgttattttatgataaaagtgttcttctaacctttgtcacaactataggaaagtctatcgaaatgtactttaatacaattaacacgcacatggtcaatttgtttatctttggctcaaaattaatttgagatcattggaaatttttggctcaacttgtgtatggtataatatataatacaagggagggggatttccatctcttatgtacctcacgagtggatgttctaattacattatcaaaactggttctttatcaatccatattttggtaattaagcataaaggggcagtgacagatagtcaaatttcaaccgacattaccacgaaagtaattatccttggaaatcaagctttattaaccgccaccgtctaagtaaagtcacacggaaatcagctagtagttacaaaggggaaaaaaaaagcttctactgattcaaaaagtcataaatctaggaagagtaaatcataaagcaataagttgaatgcaataatcaaagagaatgtccctacaaaaattgttagtcgagattcagttaccattattaactacaatcggatcacaccaatacatgacaacttctaccacgcatgatgactatgggcattctaatacaagtagactctcatgtaagaatcataaaagaatcgtgtgaaaagtgcaactaaaggaaagaccttttagggctgagctcctacacatattgtctacggcagcaggtcatggaatgcacaccacactagcatatgttatttgagattattgattgttggaaagttttggctcaatggtatatgttataataaataatatgagggacaaaggtctccatctctcatataccttgagtagatgttatggtcacattactaacacatcttacttgagattattgattgttggaaagttttggctcaatggtatctattataatatataatacgaggaagggggtctccatctcatatgtatctcacgtggatgttatagttacattacattactagagcttgtcctttaccaatccatatttcgataattaaacataaagtggcaatggcaagggtagaaattcaaacttccacggacactactatgacataattttccctggaatccaggctttattaaccgccaccgtctcagtaaattcgcacaaaaataagctagtagttacaagaaaaaaatgatagttttcaccaattcaaaaagccagaacaatcaggatatttagtgatatattttaaattagaattttagatcattttttttgtgaatgtgagtgtcaattagaattaaaaaaaattacttttttaaatggtaaatctcattttaaaatattaaaaaaagagaaaaaattacttttttgaatgtatatatcttcatggttgttttccaaaaagtcattattcatgttgaatatctttttacttggaaaccatgattttttttccaaaaattcattattcatgttgaatatctttttacttgaaagatctagtaaagattatatctaaaattcaagatctaatactaaaattacttaaaaaacaacaaattcgatatactaaccaaaaaaaaatatccctacaaaatttgttagacataatttaccattattaaccataaagggtcacaccaatactggcgacctctaccacatatgatgattatggacattctaatacaagtagactctcatataaaaaggacaataaaagatttgtgtgaaaagtgtaattaaaggaaaaaccttttaggactggactcctacatagatgcctaaggaagcaagtcatggaatgcacaccacactagcacatcttatttgaggccataaagaggtcaatgacaaagtcaaacttcaaccgacgttatcataaaaaagttctcccaaaaaaattacgccttcttaattgttactatctcgataaattcacatgaaaataagctagcagttacgagagaaaaagaaaaggaaagttttcaccgattaaaaaaaccataaatctatggagattaaagcggaaataataaatccaatgtcgaaggagaatatccatacaaaatttgttgaacatgattcgattactattattaactacattgggttgtcattaagtgacaacttctaccactattgatgactatgcacatcccaatatagacaaattctcatgtaagaatgacaagaaaagaatttgtgcggaaaatacgactcgggaaaaaccttgtagggccaagctcttatatatgcaaatgtccaatggaatgcatctgtgacattatatagaaatagtactcgttgatatcacatataggctaacagattacctcaaaattaggtctttgtgctaaaaaaattattatatcaaacattataatcttgcacaacttggtctttgcattaggaaaaaaaaagttgttatgctcatttaaaatctttttatcattcttctttgatattctccttgcttagcgcattgaatttattatcttccaattcattttttttagtatgctttcccattctctctctctctctctctctctctctctctctctctatatatatatatatatatatatatatattctctgtgatattctactaaataattgtggtataaacgttgcgggtaagagatcgtagaagctttcttttttatcagtagaagctttctaaataaataaataaacatcgctaaagtattatagcttaattattttcttgggttataggagacatgtcgaaggtgattattatgggtctcattcaagaagttactgctaataaatgtataccaagtattcgtaaaattatttttacaaagacgataataaattttaaattacatacaaattatttaaattttattttttaaaattcaacgggactaaaaatccggaaaaattatttaaactttcaccactgtaccaactctactgcattaaatagtaatgcgttaaataaattttatttagttatcttttgtgtataatgagtgcaccaaaatttaaatttataattacatgcatattagtcccaatcccccgccactatannnnnnnnnnatatcacatataggctaacagattacctcaaaattaggtctttgtgctaaaaaaattattatatcaaacattataatcttgcacaacttggtctttgcattaggaaaaaaaaagttgttatgctcatttaaaatctttttatcattcttctttgatattctccttgcttagcgcattgaatttattatcttccaattcattttttttagtatgctttcccattctctctctctctctctctctctctctctctctctctatatatatatatatatatatatatatattctctgtgatattctactaaataattgtggtataaacgttgcgggtaagagatcgtagaagctttcttttttatcagtagaagctttctaaataaataaataaacatcgctaaagtattatagcttaattattttcttgggttataggagacatgtcgaaggtgattattatgggtctcattcaagaagttactgctaataaatgtataccaagtattcgtaaaattatttttacaaagacgataataaattttaaattacatacaaattatttaaattttattttttaaaattcaacgggactaaaaatccggaaaaattatttaaactttcaccactgtaccaactctactgcattaaatagtaatgcgttaaataaattttatttagttatcttttgtgtataatgagtgcaccaaaatttaaatttataattacatgcatattagtcccaatcccccgccactatannnntataattccatgcatattagtcccaatcccccgccactatactgaatttagtggattaaatcttatttactttaaaataataacactcatgcatgcgtagaaattttaagaaaaaattaatgcctcaactttattgtaacaactagttaagaacttcaattttactttaatgatcagttaaattatttaagtttaatgataaaatgtttgaataatttcatcaattaaaaaagtttatatgaatcataaaatgctattttttattaatcctcatgatattctatataaaaatattaaacatataaaatatatttagtttttttctttatttagtaagtaggaagagctatagaaaatgttatggaaaaatataaaattatccataaacacaatattaattaaaaatttaaacacacattattaaatgctttaaatttttaatggttcaactaaatgctttgaattgatactttaaaaggtaagtattgactttatattatgaataaaatattttttaattttaattttttatcacatatatatagacacacaatagaaaaatttgtaaataaataaaatcgtgctgaagtaaaatcataaataggtttatgccttacacattgactttgattatagcgagaagagtagagtagagaagccctacaaagccgaaatatagtaacctgcattgaaagtttagtacctacactctacatccaatgcatccacaataaagtcataatttcaggaaaattatgggattgacgtacgggtaagtaagtcaaaaggagtgataattaacgaacacaatatctatctatttatctcttctttcatgttgcaagttgcaacttcagttcactctaagaagcgcgtgagaaatgctaatgggcacgtggaatgagattaattattgtaaaataagagattaatgaaactctcaaatgtcagctctgccccacatgatggagaccatttcactaagacggccccgccgtccacgtcagtccccaccctttacgcgccgtcagtctccgttatgttatgttttaacctaacgtccttcgcaacgcaggttactccattttatttttttgatctctagatagaatcgtaaaataaaaattgtaataagaaatcatttctttttatagaaactgagttatattattattagagtaaattatgcatattctcttttgatattttgaacgtaaacaacgttgaagaagaaaggtcatctgactagcacatgagttttattgaacatttttttaaatcaaaaatactatcatcgctttcatttaacatttgcaaacagaggatccttatttgcagaatacctcaagaacacaaaaaaaatactatgaatatcatatttgtgcgtacttaatttttgttttttgtcaggattttttagttgacatcaaataattacacatcaagaattttaaatcaagtcaggtctgaatccacgtattgcttcaaactacttcgcgaaaaagatgaggaacgcgtgaataatgcttctcccaccctcgttgaatcctatttcgaatcgcattgccaccactacgaaaccaaccacgcgtccgatcccctcatgaattggaacctcacgcacaaacaaccctaaacccaaaaacaccttctgaggttgtgaccaccaccgcaagttccttgcccttcttattcgacgccgcatctatgtctcccacagttcgagaccagatgttgatttgatgagtagaaagcagatttggcatggaggaggtggcgagcaccgacaatgagggtgggggaggcggttagatcagatgatggagtatccagccaaagaaggttgtggtctgagaaatgaacactccaaccctaatctctcaatgttgttgagaggaacaaatttggtttatgataaaattatatttaatttatttatttatttttaaataacttaacggaatcaggatgtcatttgagacaggggttaaaaataatgttctaaaacggaagaataatacatataataagcataaacctcagaagtgatcagtgtaattaatttgatcttattgctaaataaagattgacagcaatacaagacgaaaactcgaaatagaaagggtttgtttaattataaacaatctctaaagtttggtaaactttgcaacaacaaaccacagtgttgaacagtaacactaaattcagaaatagcataattaaccagatcattttgactctctcgttattcgaccttttaaaaatcactaataatcaaatacgtgaaaacattatgtttgtttaatatttagaaaaattaattaaaaagcactaattgcacattcttaaattttttagttacttacaaagaaatattgaattattttttgttttgaatataattaatattttaattttaataaaatatattaattttcttagtgtataaacttgatatatatataacagataaaaaactgttgacaaactttataaatgatagaagtgaaaattatttgaattttatttataacagaagtttaaagattatgtgatagcattctcaatttttcctgatatatcatattataaaatattcattttaagtagttgatggttatgaatttttaattaactgtgttataattattaaaactttctatttatagataattgttttctcattgtaattttttcatcatatgtttcattgaactatataataataataacattaatattaatatggcatttattaaattaaaattatacaattttaatatttctatattttaatttatttaaaatttattttttagcgtacacacatgagtgatatactgatactatcacatatttatgaaaaaagagtgataacatgacaggctagaatgaccagaggcggacactgacgattagggtgagcactgccctcctaaaattttattaatataaattttattgtatatatatatatatattaaaaattaaaaaatagtttaataaaaaaaattgtattacttaatataataagatataatatttttaatattatattaaaaaaataaaataaaatatttttaagattacattgcataatataatagaaatttttaatattatattacataataaaataaaatatttttaaaattgtatttaaaaataagttcgaacatttttaatattgaattaaaaaatatgatagaatatttttaagattgtattacataatataaaatatcttaatttaaaattacattgcataatatgataaaatatttttagaattacattcaaaaattggttaaattcatatgcttaaattaatataaatagaaacatatttttgtatttatagtatacattccattccaaataatgctagagttttagaaagtttaggtttgtatcattgagagaattgttatgagatcatatataaacgtttgacaagtctgattcttaactctccattaggatttaaagttatattattatagtagagttatctattggattgattatctaatttggacgttttaattttttattcaattgggtttttcaagttaaacctgattatgtcttttttatctattattttcatattgttgttttgaatttaattttaaattatgaattattttattaaaacacattagactttattaacttattcatcaatccaccctgtttacctttatgtagtttgcaatttgtctcttttatatattagatttttattgtcttcataatacttttatttatgatataacttttttatattcgaccccttttaataaaatttttacaaaatttttacttccgcaactgaaaatcacagtataaaatagctacaaatatattgtaggatttataccattatccatcttttcctacggacttttccttagcatgactatcgcaacaccaccagcatgtgtggaaagaaatgatttttaacaaggcatgtgtgccattaagtgagaagctccaagactcgatttgtttgtactaatctacctaacattaattttaaaataatgtcaatgtgtttcatgggaacaagatatatttgatttaaatacaattttgttttttttatgttttttaatttctattttttgttcttttattttaaataaagatatttgattcttttatttttaaaaattaataattatggtttaatcatttgcttacattttattttttatattttaatataattaaatttagacctaacatattcttttaaagtatcattaataaataaaatagttaattaaaatataagaaatatatagataaaattgatgattgaatcaaaattgtaaattttttaaaatagatgattaaatatttctatttttaaataaaaagaccaaaattacaatttaaataaaatagaaaaactaaaattgtatttgagcttaactctaaatggtatttttttgggtatgctaatttgattttagtgaaaaatatgaagttggtgacaccgtcaaatgagaacattttatttgtggaagcacacgttgtgtctaatgttttcctcattcacttgattattatcaggaccaattttgttgcttgttaacgaggggtgctgtctacggtgaagtttctgaaaaattctccaccggtgaggcaggttggtcaccggaaaaaaaaaaacattttttatttcaaaatgaaattatataaaatttataataaaaaaagcctcaaattacgggagagtctcatattttcctaattcttcttccccaacccaggaggccaggacgaaacttccatatctactggtgtttctcctctgtcattttaatagcttggtcaataacatttctactatgcaattttcttccttgccgggaacggagaagacgtccctgttgttgtcctcgacaaacatgattctttttcttcgcagatcgatccagtgccagtggtggtggtggtgccgttccaccggctactgtaggagagagagtttacgaaagagatagggtaaaaatccacctctcctctatttttctttttctcttcctctcatgaaaaaatccaccttgttatttgtacaatttccttttacttcccgaagatctcagcacttaaaatatgaaaaaataatcatcaacttcatcagtcgaagcttatctacaaatataaataatgaaaaagagataatgaacctccaggaaattggaaagtgaagtctgttcacaattcttgtttgctatcatcaaacaaattagtaggggcctctggaagtctagattttttctttgcgaggatcggagaagtatttgaaacggtgccgagttcatttctttttcatttttcagaaaaaatgaaaaaaaaaattacctattgatccagttaccattcttaaatcttaatcattaaatattttattaatatattctatggttatttttattgcttcgtgagtgtacctcaaaataaacaacttcatattagacttggccgttaacgagggttgaaaaggagattaatggctaaagtttggtaactgagaagaggaagaagaagaaaaaatacaaagataatgagttttaaggttgagaaggacaaaaatgtatcctatagcacgagatgcacatgaatcatttttcttcaaaacatctcaaaaactaaagtcaacaacctcaataattttgaagaggatggtaaagacttactctaatttgacgcagtttttctcaatgcaccacgctaaaaaaagatttggggacaagcaaaatcattgagcacgatggctgtcaggaaaggattatacggaatggtttgcgataaatggtttttcttttggacgaaaatcacatctaaatttagcagcgcagccaaatgacgccctaattgtcatggtgcacttctgcacaaccatccaaacatgtccttctgataggactgtagtaactaataactaagcctcattttcaggtattcaattttaaatcaatctaaaataaaaataaaaaattataaaaaaattgaaaatcaaatcaaaataatttttaaaatttttgaatattttgttctcacacatatctgtttgatttaatttataatttatgattttgaaattaaaccaaatcataacacttatattattatttatgttattttagtgttatgcactttatttatatatatatatatatttatatattggtgttgcttgcattatttttttcttctataaatgcaatgcaggatttattaatcgttcatcataaatatcatgcaactttctttcgaactttataaaatatttaaataaatcagtaaattacacaacatgatctatagtcaaatgaaattattaatatttttttatttctatcaatttgtttggtattgatcatctttttttgataattaaacgtttatcaaagaatgactaacaacttttttgggttttgtccaataccaaagaaatcgatagaatttatcagatcaaacaattttaatcatttgaatagagtaaattaagaaaaaaaagagagtaaatgatcatgtttatcctcaaaaagtgcaagtgttgttagtttagtcttgaaaattgaaactactaaaatgatcaataaaaaaagttcataaaattattatgctattattttattcctaaacttaattatttattattattttattttttaaaatttgttaatatcattgctttaattacacaattttttaagttttagactaaaaatgggtgtcaaattacacttgtaaagagatttttgtcattttattacttttaggaactaacttgacatgtctcatgtttccaataacaaaatttgtcatttaccctaaaattaattatatattgaatgaagatatcaaccattcaacatatacaattttttaatttaatagagtcggcctaatggtagagggattggaatacaaacacgaggacttaggttcaatactcgaggccaccaccgtaaaaaaaattaacatgtaatgcactgaagacatgttaattaaaaagtaaaataacacaaattattctttttggacaaggtttaaaaatagtttcattctcaataaagtgaatgattttttttatccctgtaaaaaaattatttttcatcttctaaaatatgaaatctttgtttttaattcctattaagtttattgtgatctatgtaaaataattttctttgacttttatctcttcaaaatttcatatcactgtttttgtcccccaactctcactctaaagtagataaatggcatttattttaggaatctgaatttttcttaaagtatcaaatattgacaaattaacacataaattagtaggtgccacctagaatggtcacccaacttttgttaaacacaaacattttacaagtgttacataatagtaaaaactaaaaataattaatttaactttttgaaggtctaaattaaaaaatatacaaaaaataaaactaaaattcacttatttgagaaaaactagaagcatatttaaatgtttgaataataacacagcccaaataataacatatataaccccttgtctttaaacgtacggttctctcgagtcctgagtaatatgaacttttcttttttagggtgaccaatatgaatttaactgaggtatgtttttacaaatttcgaaataattttaacttttctttataaattatggttcattatctttccgttcctaatttttttatttctatctttaatccataataatctaaatttaaagtagttaaagtctttaaatttttttttatattattgttgttatcaagtaacaaaattaagtgaaaaagtaacaacaaaaatattggtattgctgtaacttgtcacataattaataagttgatgagataattatgagtaatttaataaattttatttttaatttctcatcttttttaaaaatgcagctttaagaaaatcatgtgattattttatgagacttttttatgacatgacaagtgactgccaatgatattccttaaatgcaaagactaaaagtggtaaaaaataaaatgtttagggattttagttaatcaaaatttaaattaagtaatataaatatacattcgaaaaagtttagggagcaaaataataaaccctttaaattaacgttttaaagttctcattttaggcgcatcttgtgctttaattttatttacttttaataaaatcatcgttgtctataagaaaattaacattttaaatttaatcaagaacttgttttaatgaagtctacatcaatctatatctctgacaaatcacaccacctaatcatattttaaaatatattcaaataaaaaaaaaactaacatgacttttaatctgctgactgtatatatatgatgggtgaactggtatatttgatctgtgaaggaaaattaattaattaatctattgatggtgtttgacgttaatgccggcctttaacattttggacgagtggaaactgccgtccgtgcaagctttatagttatttaatgttattataaacagaaagaagatcacgctcatccatgatgtgagcttatctatctataaatataattgagtcaggtataatcattttttcactgtgagagagactcaactcaacagtggtaatcattcttaatttcaaaatcaaatcctggttacgatagttaaacaataataaaattatgatttatttaaaaataaatatatatatatatataattaaaaactaaaaactatcattttaaaaattactatttaaagtaatattttaaaaaacgtttaaagttaaaaaagtgagttcattttgatttgtctatttaacagacataggatttggttgggcaaccaaatttacagtctaaaaaaactgagttaatccttcctgatttcattctttgattcactaggtttaagccgaacaaaattcaatgtgccaactctaattaaagaattatgcaaagcatgcattatgtgaataacaaaatcaatgtgcatcttcgtttcataatataaaacgtttaaggtttttatgtaagtatgaatataatgaatttattaaattttaaagaaaatattagataattttttaatatattttttatttctctaattaaggattcattcattcttcctatgcactactcccattaagtatttattaaggatattttaggaaaaaaaatatttaacataacattggttttataaaatgacatattttaaaataaatnnnnnnnnnnnnnnnnnnnnnnnnnnnnnnnnnnnnnnnnnnnnnnnnnnnnnnnnnnnnnnnnnnnnnnnnnnnnnnnnnnnnnnnnnnnnnnnnnnnnnnnnnnnnnnnnttttctctaaaacatcatatattctggaatagagggagtattaaaatattcatttatttctaaattatatgatgtttttaagattttgacacgtgaattaaagaatataattaatttattgaatttcaaataaaatattaagtaattttctaatatatcatttatctctttaatcaatatgtcatttactcttctatacattattcctactaagtattgattaaggatagttttggaaaannnnnnnnnnnnnnnnnnnnnnnnnnnnnnnnnnnnnnnnnnnnnnnnnnnnnnnnnnnnnnnnnnnnnnnnnnnnnnnnnnnnnnnnnnnnnnnnnnnnnnnnnnnnnnnnnnnnnnnnnnnnnnnnnnnnnnnnnnnnnnnnnnnnataaaatattaagtaattttctaatatatgatttatctctttaattgctatgtcatttactcttctatacattattcctactaagtattgattaaggatagttttggaaaaaatatttaatgtggccttgattttgtaaaacatattttgaaatatttttttctctctaaaacgttatataatttgaaacgaaagaagtattttcaattcaattttctttattggttcaccaaaaaatcttttattgatttaggtgatgcaaataacctctatgcaataatttggttggatatttttcgggtaactgtcgtagttagattccttgatttttcagtgggaccttgaagtattcgtaaagttttgatctttaaattaattataaaattaatcattttgtttgaatttagttatatttaaaattcattatctttctctaagaatgtatgatgtgaaaatcaaattcaatattttcttataaactcataatgtattatcaattgatttacaccaacaaatgttggacataaagaagttgaaagagaatggaaaacaaatcaaattaagctacttctcttgtgtgaataataataataataaaaaaaataaaagtggtccaacattttctcaatctctccattttggaaagaaagttggtcaaagatgataaaaatattaaattaaccttatgcttacatatctattttttttattaaggatatttacatgattttatatacaaatttttctttatttctactttctacataacaaatcaagagatgtaaaattttgaactttatttcttttcattctgacttctaccaaccaacctaaaaatcatctcattatttactattttttttttcttttctttcacctttcatttttttataccagacaaagcatacaagtgggtgttaattatagctaggcatataaaaaggagaagggtggcctagatcatagatgggtcatgggtgattcatcgttctcagcacgagcgaactagcaaagcatgcatcactatcaatcctcatttataggaggaaaatgacgagcattgtttggactcgtctaatatactttgcagagttaaaaacaaaattccgtactcagggagcacatcaaagtaaacatttggaataaataagtttttagaataccatgtaattaaaaaccaatattatgctagttgaattaatttgacaacaatatttgtataatttcacggtcaaatagaaaaaataacattatatattttggcaatttcagtttggttagtatacaaggtatatacatcattcatatgatatggatgttctcgtattaatatctagtaatgacattttctgagaaaaaaaaacaattaataagtttcatcattatttatataggacttgttaatttcaatttttaaaattttcctctcatatggcattatcatgttagacatttacacgaggatcttgatcttaatacataagggtcacacaagtatatgttacattactgtaaaaacaaaaaaatactgtaaaaaaaatacatatataagaatttgtccagcccattcaagagaaattgaggttttagataaaataataatagtattttttaatatgataaaaaattaaactcaaatattatttaaataatttaattttaacttgaaaatattaattatatttgtatccaatcacttaattatagtatcaacatttttttatttataaatacttctaacatcatataactgattgtctgattttcaagagagagaaaaaaaaaacatgtttttgctttgatgatggatagactgcattattcagccaaaaataaaataaaaatggatggactgcatttattttcacaagacgttttatggtaccctcttccctctatatactagtagatggatgggttcaaattaatacagattttaattaattatgcaaaatttccaacacgtcaatttcttaataatgttttcatatcatcgaatcaattgagcacttcattgaatatattaaatggttcttgtctgcgggtggcaatgtgcaatcgtcctgataggagaaagaagaccaatcccaaagatagactatactgcacttcttttctttgattttcttagaagagaaaataaagagtcatagtcgatcattcaagacctaattagtagtacatattgaagaatatttaatatttaaagctgatgtgaacatataacagaacatctaataaatataaaataatatagttaaattaaaatattcttatttaattctagtattttttttgtaattaaatattattgtagttattaaatagagctacagataaaaagtaattaatgtaaaacatcaacgataattttgattttttttttaaaaacaatgaatatgaaatgaaggtagtatatatgagaaaaatttaaaaagatctaattggattggttgagcaagatctaattcgattggttgagcatcatttattataaacccttcacttcacattaagcaaatgaaagcaaattacaatcaacggatcaagtttgttagttttataatttttcaactcaaacatattagacttatcgtaacgtataatctatcaaataggatttggtgtatttctttgtacttcttttctggtttgagacactcctttgttaaaaaccagttttttttttagtaatattcagttttgtctttaaaaataaaaaaaaactcaaaacttgccagacataaattgggtttgtctttctggaaagctaaaaattgaataaaaattgatcaaaactttttttttttttttttaaatttccgagtcaaattaattgagatccgcttaactatttttcaatcactgcatcaacggcgtcagagcttaacgttataacatctcgatgtttaattcaatggccctcacatatcataccagtatcttgcaggtggaagtagaattgtttcgatgttactagtactagctaataaggaacagaaaagtttcactttctaaaaggaaagtgaaaaatatttatgtacctaataaagtaacttagcattgaaattcaatcattttcttatgaaatttacttaggctttccaagaaagtcgaaaagttaatgcacttataataacccttgactttatcaactttcattatttactaggttttttcttctctggataaaaccaaactgtagttaataatagttaatgacccaatctacagagtaaccataaatgaacaatttcgttgaaaacaattgtatccagataagaaaataaagagtcccatgaaattaaaatttctgtccaatatctcacaattagtaaaagaacctggattagaaatcactaggttttgtttaattatgaacgtcggacaagagagtaatatgactctttcctgttagtcaattatttagctatatatgttaataacaagaggtacctaatgcaaatgtacttttctctaaaaattgtttgatcattcttattttctagtaagattttttatatcatgctctagctgaatatatttgaaacagaatggagaaatccacctttgtttcaaccatcatatcaaagtttttccccaaacatcttataacaaacattttcatgtgctatatttattttacacattgtctcatctgatcattgttgggccgaaagctacccacgacccaattgatagagtttcaactaatccaatccacaaatgatatgtatcatgatttcgtacttacttggtcctatatcccaaaaatttgaaggatacactctaataatatcttatctttggagaccacaaagatatataagatatgattaaattagatcaccacctaaaagactagtatataattcaagttggatctagagataagggtagattacatactttagataaacaacctcaaactccggaagaagccctatatcaaaaacataaatattttctatctttccaaactaattttgactaaattaaaagataaacacctattaactactgtccaattacaacaatattttgtgtgtgtgtgacaaaaatattttaattttaataccatccaaatataatgaacattagtggacagttatttttgaccactctacttaaaaataataactatcttatatatagagaatcttaatgtttaaagttagagtatctcgaacctaataatcgaattccaggcatattatgcaagcaaaactttgtaaaagatacttaaaatacatatggaaggaaaatatgaggaaaaatcagaaagacaatataacatgtaggaccatttaatgttcagaggcatatataattgtacctttcaaagattcttccgatatttcgtttagggtccaagagttggttggattcatgcatttgcactgagggaggggggaagagaaccatacattggtatctaattggggccacaagatagcgagatttaaccccctgccatgtgcatcatggtccatcttagtaatctagcttggttcctgcaccttagtgtgtagcttcccaccaatcccatctcagaggctcagaaagtgaaaactcatttgaaccttaggggagtgtttgttgtgaattgcttttggggtcccgggtttcaatttagatgcacatgaaatgaaatcataaaataaaaaaaataaatgcctttaagagggcatgccatgttttactttcacccttggactaaaccaaagtgggatcaactgctactttgcttcaccaatcccaaccctgcccatatgatcatgtgcatgtgatgtttggttttccacaatccgtggcccgtccttgactactaatgaaagtgattttttcacttctccttctggtgctgatgtctgccttttagttttaatcacgcagcctcatcaactcatgtctttgatggaggggatattcttgaataagcacggttatagctagggatcagttgatatggggactttttagtatatatgacaccaacacaagattgcccatgtctagtgtgtgactatggtaggtggctagtgtttacttgaaattttctctagattaagtgctgaaatttgagaatagattcatttatatatatataagcaccaagagaatgtatgtttctttgcttatgattattctttattaaaaatttgtttaatcatttttagtagattttttttattttaattatattttttaatttataagatttgagttgaaattttatttaaaagatttgaatctaatttcattaggatcaataacatattgataaagaaagtatgtgcatttaacttacactgcaacaaaatttattttgaaacaattatattgtgatataaactaatggttggtacttagaaaaaaactatggcttgtaaaatattattagattataatttgtggtaaataagcattagtatgtaaaaatttaatttatagcattaataggcaaaagttaataaaatggttttttttttttacaataaaatgattatttacgtgcactcactaaaattttcagtaatccttttatcatcctgaatacactaaccataatctaattgttaacaaatgttttagtagttatttaaattgtcactaaaaggcataataattatcacaaaaaataacgtttgttatagttgtcttgtactatagaattttataaaagcaagtagccataatctagcataagtaacaaaagagattttttgaataatctagcataagtaacaaaagagatcgtgaatcattgattattgtattgcatatttttttaacaggcattcgatttattttttcttgtcgacgtagttgcggaatttggagcattgcatcaatgtattgtatgtaagaaatatgaaggaaaaaaaaagtaaatttaaaattatattacaaaatattatattttgttgataataaaatataaaattaatttcataatattatttccactacaattaaaatgagcttcaatttagtcaccatataatgaaatttagacgaattttaataagttaaaatacatataaattgtacaaacagacacctaagagagtaaataagaaataaacaagttagtgactcaacaaaatatattcctctcaatttattttatgttcaaagataaacatgactcaaactctagattatttagtcaaggaacacaatttttgtctattattatgaaaagtctatctaaatgtcataatagtgcttacttgttttgtgaagaacgttttgattttgcattttcaaactctcctcaaattggatggtggggaatctcacccctagtagcaagtagtgtatggataggtttgaagactgtccccacatcttgcattcgacccgtacgaaactacgaatttgaggctaatcccttctgcttcagcttccacttaactcttaaagaaataatattatgtttattattgttactaacaaagttatgagcttaaaatctattcacccacaatgtaaaaaaaaccttgcatactcaattaatcataatttcataaatgatgttaggcatttaagttaattatggtaaacgtcaagaagttagttatttaattattttttccctgtttaatgtttgttttgaaattcttcaaatttatgagattggttagttaatcataataacgcaaattaattgtataaatttattttaaaatattcataagtattttaagaaaagccagaacaaatgcaatattttaagaaaaaaaaaattctgagaaaaatgctagttttggttcctgacattctttcccaaacctaaatgtaattatcactaatcactatctatcggttgagaatgattcctcgttggtcattaatcaagtttcaagtgtctttcactctttcttgatataaattaggttgctttgcttggattttttaggtttggacattttttacgattacaacatatctgtcgacttcttattgttaattgtgtgggctaatgtaattgtaggctttgattatgggtgtatttttctttttggttggtacggttagttttgatatacttatatgagctcagtatatatttattgtgtgaacttataggtctataagactataactttatttatgttctgtgaagtatttttttaaaatgtaaatattgttgaactcacaaattaaataaaatttatatctacatagctactcctcgtctgcattttagtcttccagcctgtaccaaaaaaaggtcactgtacaaataaaaaaaatagtcatccagcatttttggtagccataagatatgagatagagtatctaaaaagaaagatacgagatagagagcgctttgggcttggacaaaggcttttcataaacatggagaagcccatgctgtctactgatccatattctgacccaaagtgtatttattcaaaagatccttttgaaattgacattagacatttttaatttattttttttgtgtaaaaaattataaaatatcatattttttaaattttattccccaaagtaatgacttaagagaaatttttgtctgatgtgagaatacaagctgaaagaaagatcattaacgtgttaaacgtacaacatctagctgttcattttcaaccgttcaatatattatgaactagttctcaaactgattggtatgcttgaaataaattcaacttagtttctgagttaaaaaacaaagnnnnnnnnnnnnnnnnnnnnnnnnnnnnnnnnnnnnnnnnnnnnnnnnnnnnnnnnnnnnnnnnnnnnnnnnnnnnnnnttatttttaatattatattaatataaaaattttataataattagactatacacatagtacattgacttgatttagaaaaaaaaattattattttgtttcatgatttagtttacttaaaaaaatttattccttaaatttaatgttttctccgtcgctagtaagatataattgactaatttacatttattgaaaaattagttaagttaataattaatattgaatttataatatttttctaattttattcttaattttattggaaatctattcatcttgtttaattttcatgagagagaaaaagataatttaggatattttaataaaaaaattaaagtatgcgagaaatgaaattaagtcttataacaaaaaaacaaaatatttatcgattatctcttggaaacaaggatgcagggagtaaatttaatatcaattgagttcaaatgaaaaaaatatatttgaaagaatgttatatttatttttctaatattaaaaaatattttagtttttacgaaattatgtaatagatgataaacttgagaaataatttagtgatttagtatttaagtataagaaaaataatttaaaaatactgtcaaagagaaaaagttgcagttatataagtgtaaatgggaaatgtttgcctgctacttttaaaaaccagcgagagatttgtaaaaggaaaaaaaaaaaaaaaagcgagaaatacaaattggaaaaagcgaatacgttgtaaaaaaacaaaaaacagagaaattgttaccatttgtgatttgagnaaaaaaaaaaaaaagaagcgagaaatacaaattagaaaaagcgaatacgttgtaaaaaaacaaaaaacatagaaattgttaccctttgtgatttgtgagtttcctacgtagtgttctcattcgttgttggtcgtgctcgtcctctttctgtcgccattctcgtcgatccgaagcgcaaaacaacctcaatccctacgaatttcgtgtctcgaactcgatcactaatatcaaggtaacaatcaccgattccaaaatctattgttctgttcgatttgcatgttaatcttcgtaatgattttgatgcttagattctcttcgtggaagcctatggctttttcttttgttttggttgttgcacttgcacgctcatagggatagctatgctggttgtaaagtcttgttctttattcatgtacttttgtggggttggtctaattacggcttgtaattattcaattctcattcctatacattcatatttggcttttccaaaaaaaaaaaaatgaaaatgcatgctttctgggttgaaataagtgcgtttggtttagaacactctgctgcagatgatccacggctggacgcccagttatgatctccaaaagtaggaccccaaatgaaaaaaaacataatttttctcccctacaattccatgcatgaaatgaaatattcaggagcacaatagctgcaaatcaagtaattaggtgaatatattaaatcacgagaacctactaaactctagcattagtaattttttatttgcgtacccaaatgtgccttcaaattttgatacattatggtgagtctattgttctggtaaccacttcgcaagcccaaaatcacatatctggataaaatctcaatcaattaataagggagtgatatatcagaaagattgcgtcaaacaacagggagtacaacagagccttaagagacatggccttctactaatctaatttacaagccgaacatgaattagcatcatttagccattagcacaaaacatgacatgaaagctcagttcatgtattatctcttggcaaaagttgaaattttctcagaggataagaataatattagaaaatagtattctattgcttaattaatgatgatatggcatatatatatacacacacacacacacatgaggagctcattacagcaatagaagttaagtttggcaatagaagttaagtttagcttagcttagaatattggaacatatcaattgataacagcataataatataaaattgttacacctgaaactaatgatgaagttaatgctcctacacacccacaaaaattcagaatacattcatggagcctaagtttcatgtatcaaagtaataaattcaaaattctccatgacctgaatattctctgccttaatatctctatgaaggattcgcctgtgacaacactcatgcagatagaggagaccatcagctattcccagcgcaattttataccttttactccattctaatttgtttttatttgaacctggaatacacaccatgaaagaataaacagtaaatactaaatacattaacatcaagttttctcatacaaggaatctgcaatgcaaactaaagtacaaaccatgaagaagagatcctagacttccgagtgtatatagttcaaagactagttgcatttctccttctggcttctacacaacatccaactagcctggcagtattaggatggtcaacatgagcaattacacctagctcacatagaaagcctgcggttttttcatctgtggtccctttagtcaattttttcacagctattaattgcccatcttggagacaccccttgtaaacctcagccagaccacctcttccaattatattttcaacatgtaaaaggaacgatgaaaatcaacctagtcaaactgatcccctctaagagtaaaaaagagcattagaatcaaaatgtgacatagttagggtgagatttcagaccattgctaaaattgttggttgcatttctgagttcagagaggctgaaagtaatccaagaagacctgaagttgtattgcttatttagaacttggttttctcttctgcttttgcttttccactttggtatgttgggcatactaggaggagagagagtgtgccctcgtgcttgtacaagtggtttctgattcaggtgattggtcgtgagagttaaagtctttcatgcagacttccaagactcctcttggtgatgctatatcttctttctctttctccaattccaaatgcctcaagtctagggttgaaataagtaggatgtgttgcattttgaggtgtatttttgtgttcctattttctatcacaaatattttaggggttgaaaccttttctgttttatttttttacttgattcctttgtgtatctttccccccttccccttgtactcctttagacttttgattataaagattaattttttaatttttggtaatcttttacttttaaaaaaaatgcataatagaataccatctaaatctaatttggtcagaagaggcattattatagatgaagaagggggttggtgtgggatgtagaagtatgacataatgatatgaatatgcattttcagcagtttcaggggcgtaaaggactggtataaaagtggaggaatggaatgttatttggtttgctgtgttaagggaaatttggatcaatagaaaccatatgttgttcaggcagaaattgattaatatacaagacatagttgagaatgttaaaattcattcttggagatggttgagggcaaggaggaaaggttttacttattctttgacatcatggatatcaaatcctagacagtgtcttggagaaagttcaataatttttgaataatgatgcagaattttggaggttgaaaatcacttgtataaggttggctggtggacattggaattagcagttgctgaataatgaatttcatgtgagatggcatgggatagttatggtgagggaccaaactgggtgaatgagttggtggatattattatgttcaagtttggagacttatggaaatggtcaaagtcatgaaataattctcagatatcagttggggatatggatcgaacgcatggtgggcacttggttctggatctgctatgtacataatttagatgtagatggtccaattttaaacagatacaggcagttaaaacaataaaagggaatgctttcagatgtgttgcaggaaaagaataaagattgatcctgttatgatcagaatcgtgatgcgcttttggtcctttggttgcttcaaattatgcaggtttaaagattggtaatatgctgcagcatgaagtgggcagagaaatatagttggtatctaaagtttttttctattcatctatgttggattatactctgggtgttagctagaggtattttgaactatgatgtatagtgtttctgtctttgttttgggcactacttgtgctaaaactgagtgttttttaatattatattcatcaatgtggaatcaagcatgtgaaaaattacctaaaattgcatttaagtgatatttcaacgtaaatctagagaaatgtgaaaccaaaaatgcactaagtctgatgaaaacactttcaaaggttttatatgaaaaaatattagttatttgacttgatcctgactgacccaaaaaaggaaatttgtttttgcagctggaagagatgaattggatacagcgcaagatctacctttacaatgtgacttttgggctgtatatgttggactggtgggagcgctgtaccttcagtatcctttattgcactctatagtctattctaaatggattttaactcctttatgtgttttttcctttgtaattctcttggaatgcaaaattttgatcatttcgagatatttatgtggggggtttctttaaaaaggttcatcaattgatggaaatttgtttgtcacatacgtataagttagtctgtccaatagtggttttggggtcctttggttagaaagacaacttaaactatgttagagaattatgaaaatgaagttaaggaatttcttaaattcatatgctgtcttgtctgttgtggtactgcttgttggagttcctaaatttttgcagatattgtggtgattgtattaatgtgtttcgttctacgttatgttactcagttcttcaagaggtagtgcatctcctccatctttttaattagtgacataaattgaatccgtccaagtcttaacatgcaggtagtttactggattataaaaaacaaaaaaaaaaaactacataccttattgtccagatgctcctcgctatatgaaagtaaaggggagagatattgtatgcagccttatccttacatatgaaaagagacatatttccaaatttgaacccatgatcaccaagtcaccaaaacacaactttaacgctatgtcaagactcgccctcagtttactggattataatgatatataattatttgtggttattaagtctgctagtttttattgcacttattcttgttaattagtaatgcatatcactgcagtctgcaaagaatatttaacatgcatgtagtaaaaagcacactctgacatttctccaatctccacctatgcaaactcttaaccaaatactttttacgtcattaatctcctacatttgtcgctataaagggctattagactatatacaaattttagaaaactcagatctatatgtaacatatttacggacttctacaatgatctgaagataaccattggtcaaaactcaaagttgagactttttcaccaattatttatttcactgcagtcaatgtaaattagagatcgaagccaaaataagcagagtaacatactattcttggggggattatatatttaatccaattgatgtaaatcctttgtagtgcagcaatataccattctgagagccctttatatcttagcatccgatttagctcccattcccaattctgaatgtgcaaataaatgtagaattgtagattctttgtacacaatacttccacagcctttgaataaaaaataatagtgttcaaaatcttcatttaatctattgttgcagccacttatattgcaatttttgcactagatcagcttggaaatgcgaccaaatttattatcctgcaattgcaaaaaaaatatctgtgcatgttgcaattgaaattactgtatcaatttgaccttttcttcctgtctaaactttttatgttttaaatttcaggtatgtttggtaagaagcaaaaccattgtcacgggaagaagcaaatgtagattgttacttgggggattatattacttgctgccggtgtatttggtatagatgactagggaatatcttgatatagcctgacttggaatttctttaagctacccagaaattgcccttttgatgccaaatatacacaccgacatgaatcttatttgaacatcttttcttataagcttgtataggatgccaattagcattctttacattgtgataatttttgggaatgttcaaatactaagcgttttttgacttttgaatagtggaaagtgtgagctcctccgaatgccatcaaaggtttcttcataaaaaggggaagtgtaattaaaataaaaatcacatttcgagatggaatgactaaagctagttactccctccctccctctgtcgtcttaaattattttatacgaaaaaataataaatagataaaaaaagtattaatttttaaaattaattttatattatcattaatttatttataaattttgttgttcattattaatattattaaagatataagggaaaataaataatcaatgatttcattgaaaaatgaaaatagtaattattttgagataattgtttttacacaataattataatgggatggagggagtgcaatttttgtcatttttttctaaattgaagagcatagtatgaaaattttagatgggaattggataaatttttgtattcaatttttaaatatcatctaaattgtcattgatgaatgtacatgtgcggacatggtatttcgagcatattatctaaatgtgggtacataggaagagatgagtgtaatcgtttaccaggttctccaaatagagtgcatgctttcttatcatgcttgatttgggttgccatgtttaatagactagcttcaatgtggattcttaatctttatgtattagataatttatttttagtcattttttctttatctttctcctctcttttttttcccttctttgcttttatcattttttttctttttaacctccttatatctattattggattcatctatcactgatcccaattaattttagattaaagatgttattgatattaatgtcattttagtgtacttgtactctccacaatcgctatttatctttacctttttgttcaatgaaaaaaattgacgcttcatagttcacatgcatacaacttggttttagactattaagttattctaacaagttgttgaataagatgtgtgagttgtttaatttttttttttttatatttatctttaattcttatggatcaaaaagttggtttgatgttgttttgatgcttggcattaaactggagtttgttattgtcgtacttgtccgatcttcatttttaatcatatcatattttattttaaaaaatactgataaaaaataataaagaaatttcctcagactttttaacttctatctttcaaggatgaccaaattgtacctaaaattttaactcagttgacgattattaagtgattgtctcggcggttactcatgaatattcaaatgatgcttttaagtttctaaccaagatgtttgtttatcctttaaatttaattgttttttttttttgtcattttttctgtaaataaaaaagacaaagcaagcaattaaaggataaacaaaatgcttgtttctgttttgctaaacaccaacttcgtcaattaaaactcaccaccaatggactaggcactcaaaattaagaagagtaatcctatttacaaattgttcggataaaatcttccaaagacctgattgagacgaaagattcctcactttagaatttagagcagtcaacaagagtaatatcaagtgaagatgtgcatatcatgcattcccaagtcgtagcagcatttttgaagttgattgtgccataactgatgtcataataatattcgtgattatacccaatcaatagtggataagatgatttgaagtaatcactaatctcccgccacaacttaaacacgttttcgttgatgaagtatataacaaaaatatgattataataaaaatgtgattttattatatattttgttcaacaaaaatgagtttttgttatattattacgaaaaaatataattaattttatatattatacttttgtaaagtgattaaattaatagtgatataatttttttaaaaattaaaataaaaataattaagatacaatttaccttttttaacaatagtcagtatatcatatagattatttacaaaagtaattgagttactttattaatagtaatcaaattattatgatacaaatttgtttatatcataattaatttaattacaattaaaacatataaattgtgttatcattaatttaaattttaattgaaaatataatttatatcacaaataattttattactattaaaaaaagtaatgtgtgtcatcattaagataatttgtatgtaagtaatttaattattgtaaaaaaggtaacttatattataattaaataattaaaaataaaatatatatgatgaatgatgattttattatgtatataagcctagatacataaaggaatcattgtgcatctatttaaatacaaaatggaattatgattctatttgaatctaaaagttaaagaagaaaagaaagagagaaaagtgtggaggtgaaagagaataaaatagggaaagcatagtgctgggaagtgaggggtgaggaaaataaaggaggttaagagtgtctttttggatgtttctgaaaaagaaaggaggtgaaaaatgcaagaaaatagaagtgagaacagaataacagctctccttaatgaataattttaagattgagtattggacatatatacttgtattaaatactcattatcttcaaagtaaaatagaaaaatacatttaaatgttctgttcttggattgtctagcaaatattaccttcaaaataaaactacaggtggtataattattattcaatgtttcacactagtttaatgttttccattaagaaaaatatttaaatcttaaaatcttactgtttaaaaataatcataggcaaggtcgcaaaggtctaaacaagtaaaaattaacatactacaatcagtctaggaatgaaatttgggtaatataggcaagttcctaaattcaaaccttgtttgtgccattgtgaaaaaaaaaatacaaagtaaaaaaatgtggttaatttcgtattttcattagtgagtatttggtacattatatgattattttaaaatgaagataaaatataaaaaagaaagtgttgtataacgtaaaagtgttttacactgtattactattaaactcataaaaatatgaattaaaagataaaaaaaaaaaataatttctacagtgagttatgctgacaaaatataaatatttgaaaaaatatactaaacaaaataaaagaagaataaatgagaatattttaatcatattataatattttattttaattaaaaatatcttcgtgtgtgtattaaccttaaaaatcaataactttataatatattataggtttaactgttcataaaaaagcattttaaaatgcactgttcattccttaaaaaaaaacatacggttcatattgaataaattataaaaataagttttataacatactattaaatgatatctttttaacttgtgtaaaagtatttatttttttgtttcgacctttttcctattttttcagacattttgataaaaacttctttatatatcactaacttttaactagttaaaatcatgatacactttattaaaattaaaattaaaatcaatgatgaatgcagagttcttggtttacataaccaaataggtatggataaaactaagacaatggaatcaaacatgtgctgattaagctagcataatggtgtcaaacacgtgctacaacgtgcggaatgcagaaatagtatatttacatacatttcatcaaagaactaaatatatcatccaatgctttacagaggaagttttctgtgatgtctaaccgaaaatgatattttgggaaaactagcatctacatgataatatgatctcataaaactattaacattatattaaagaaacatgcaaattataggaagtcagtgaccatctttcgagaagctataactagcatgtaaatctttcaactaggggttatataatctgcaacgagggttgtcatgtcatgtgggacataaaaatcaccacaaaaaagtataagaaaaatataccacccactacacatgttctcatcatcagcataaacaacctacgaccttcacacctgggtcaatgttgttgttgttgttgtaccagactcttcttgtaaatctctaagtttgaagtagccacagcagacaaactataaatctcagtagatcgaaactcatcacaatctgtggagccattcttggtgaaaaaagcaatcagagtattcatcatcctactcacagctgactcaaattctttctgggcgttagccgtagaactattgccactacttggagctagattatgtacaaccgagccgaccggaaccccctccacgtatgatttacaagctctcagtatttcaaatgctcgggtacggaaatgtcccgcaaccaactcctcgaagtgctgcatatgaaagaaatgttacacaagattgtgatttagacagttcttcagttaaggctccacacacatcaggtttaggtgtgtttatatgaccagaaaaccatataacctagatccaatagttaagctcacaatatcagctatctatctatatattcatgaaaataacagagtaacatataaatgacctatgctacacagcgttggaataatagttggagagtgacaattcacaagtacttggcgtttcctgttaattcatcaaagtagcaaactcctaacatcctagaagtctcaaatcaaataataattagtaaaacggatttcatattaattctttttttttttttacttaatagagaaagggtcagttatctgttacagttataaatatgaagaattgaaatttattcttgataatttcttaaaaaatttataccataggcaaaagtcacagcaagtgatcatccaacacaattgaaccttcacaaattcttggtcaaaataaatattccattttctcaatcattatataaaagatgagtcctgcatgaatctcctgaataatacatcaggagaaacctaaagtacaactgactacatctggttaaaattagaaatcagtcaatattgcccaaaaagctaatacacaaaagataacccgatagatcaaaattatatcaatgtataagaccgaaggctggtaaatataaatcagtcagttaaaccataacataaattttttctattgctaagcataactgttcctggagatcatatgtatgcattttcactatgttgatattctgcacactttctttcctagtcctattttaactttttcttttttattttattttttaatagaaagataaatttatggtttgtgtttcttacagttcgcctttaaaagaataattataaattttgtttttcattaatagtttttatttgatttttaaaagttttgtaagtttttcacataaaacacacatacctgtatcataatttttttaaaagggacatcctgtatcattccagtgttgtatccaatatccacatcagtgcttctttgctctatacaactatgtacaaggttaagagaaagatcatagaagtatgtttctagagaaagctttgcataactttaatcactgcaattatttgaatttcttttgaaggcaggtaaaatggaggtaatcctactgatcacatgcagctacgttgtttaacaataaaagttatctgagctcatgattcaggagtgcagttgactcaatatcaggatgcattattcagctcctaatatctgtagcctgtttagtgacttcataatcctcttctcgtctattgatttttaatatctagtcaaagtttaatattataaaataataatatatattatatgatatgacatctaaaatcttgaaacagatatttagttgtactggtgcaatttattgagtagacacagtatcataaaaaaggcagccaaatccatctatcaccatgtatgaaattcagctcagaatcacaacaattactggaaatataagtgaccatttggtttgaaataatgttttctattatcattttctgatttcacttttaattaccaaaataccatcttgtttttactttgtatgctgcttttatatgtttgtactttgtatatgaaacagtaaatacaactttttattgttttgtttacactatttcttacacatacaaactttgaaaacagttaacaagatgaaaacaaggtggtatttttagtaattaaaaatgaaaatagaaaatcaaaacagaaaacatttttgtcaaatcaaacagccactaagatatcaaaagtatcaacgaaaagagtatacccaaagattacagaatcatgcattattctagtctacatacctttgggggtttccgcagagtatacatcattgtcttcaaggataaaataaatgtactctcattgtactccttagatcttctttgcccctcagaaccaggatatgttgatggatacccgggctcattaaaaaaaggcttctcatttagaattagagcttgtattgaaaccaacacttgtagcatggttgatttttctggaatccagttttcgctatttctaccatgccaagtgcccaaaagactaaggcagacttttccacattgatataaatttggatttagcctcaggccacctgagtggtagtgaactttctgccaaagatagtacaagttaatattatacacacagcacaagacacaacttaaaacacgtgaaacatggatgatgcataccggtggacctgcagggtaggtagaaggaaagaggcaatcaaaaaagaaaagaccatcatggtatggggtgccttgaggtccaatgataacagcccttagaagctccatccttgattcacaaactcttacaaagattgtctctgtaaaagtaagtccatgtgcaatggttgaaaatgaaagcaaattttcataaagtttgagagtttcaccacaatgataaaaggttggatggtaaaaagaagttggacaatgattttccattctcccaaaaacgattttaaagatggcaattgttattagaaaactggattaaaaaaaatgcaacagagagacacttcaaataatacatctctaggaaaggccacaacaacaacaaatatcatcttgtagataaaggataatgaatatcttttctagagagagaaagactttacctggcagattttcctttaaaatttcccattcctcctggacctttttggcccaatttttaggcttctgtaacatttaaaaaaagccagattctattcaatcagtagcttaaaatttaaaaatacatgttggcaaaatgcaaactattagccaaaaacagtttcccaatatttatcacctgtgcatctttagttccctctttatcatagtgatgatcaggaaaagagtcaacagtatcaaattgcttaaattgttgaaacttttgcatgatgatatcttcagtttcatccactttttccttggaactagattctgtactggaaaaagcaatagcctgcttgcattcactagaagaaatgtccttcaaccaaggcagtgatgcctccaccccaggaggcaaatccacattgtcaaattggtcctgcatacttgaataatcatcttcatagatatcatcatcattgtaataaaaagcataatcagcatcttcatctccgtcatcgtcaatcatatctgcatcatcatcaatcataccctcatcattatgacatgaaatatcagaattgtaaccatttagattgtttgaattcagtgttccataggtagaactcttgcagagatcaccactcccagatgactctcccacactcacagaatttccatgatcattgatcaaagtatcctgcaaaagaagataaaccaaaaaatgaaaaataaacacatagtgctaaaggtcatgctaagcacgtgggttcatccccaatctaaacaaaaaattaaatagttttccactgccaccaagtgcaactttttcattatactccccccctctccccctgcaatgcacacaacccatattttcccccaagaaattgttctttctttcaacctcaattatgtaaaaaatacgataatacgtaggattgacacaggaagtgactttactgcaatgtgcagattagtaagtccagcagtaagcccccatgtcaacagatttttgactttccaactaagcttgggtgattttagaacactctattactaaactgttggcatgatgtatcatgaacacgaagaacataccaaccacatcacatcactgttcagaagtaatgagattcagctacaggtattggtaggctatgaagtcaactctgatagggacttgggtactatggggtgcctaagtctcacatcgggtagtataggatgcacagtgaagtacttaagtgcctagtttttaagggagggttctctaagtacttgggtgcatatcaaaatcattaatttttaaggggtaggggtaggggaaaaagacaatcccttatccatgaatttaacatgtaccaactacttattctgtatgggatcatacctagaatttgcaggccatgtaactgtcactcaaaacaaacgtccagtttcattttattttttttacagcaacaatagaaatttaataaaagcttagaagatatttccatactcccaaatcaaatgcactgacaaacacaaacacgttttcaagtctgtcttttggctattttctaaggtgatgagttcttaaaaaaacgagcaagttttatggcattttaggcattgttcccacccacattagtaagtatcgctgtaaaattattgttgagatagttaattcagttagttagttagtaactgttttagctttatatggcttatatgaaactctataaaagtgtgcttgtatttttctgcaagagagtaatgcagtgagtgaatgaataagtttttcctcagtccacaaaacctctgctctgttatactctgttctaacaactggtatccagagccttatgttcttggtagagaaagagtgagatttccactgtgtgtgaggagtgggtgagcaatgctgtgtgagaagtttacggagtgaaagcagagagtgaattctgctgtgagaagagagtgagttgttgaagatggccacctccaaaaatggtggttttccagcaacgttacccattcttgatggaaagaattgggataagtggagcaatcaaatggaagccattcttggttttcaagatgttcttgaagtgattacagaaggcatcgaaaagatcactacagcaaaggtggatgaagctcatgccaaagaaatcaagaagaagaactacaaagcactgttcattctccatcaatgtgttgatgcgggtcattatgaaaagatttctggagtcaagagtgcaaagcaagcatgggacattcttcaacaggccaatgctggtgctgagaagatcaagaaagtcaggttgcagaccttgaagagacaatatgagctactggaaatggaagaaacagaaagtgttggaacctatatcaatcaggtccaaactcttgccaatcaaatgaagagctgtggcaagaaagtctcagatcgatcaatcgtcgaaaagattttgagaacattacccacaaaatttgatgtaattgttgtgtcaattgaggagacccgggatcttgaccaaatgaagcttgaagaattacaaggctcccttgaagcattcgaaatgagatgtgctggaagaaaagaaaaaccaggtgaacaagctctgcaagcccaatccagttggagaaaggaaggagataattcaaaaattaaaagaggaaaaagcagatggagaggtggtagcagcagagggagaggccagtcaaattggaacaatcagaatttcaattctggcaggcctgcatttgatcagaaatcatatgacatcaagcaaaggagaggaggttcgtgtggtctaagaggaagaggtgaaaggaagagaatggacaagagtggcattcaatgccacaattgtcaaaaatggggccattttgcagatgaatgttggcacaatgacaagaagcattcaagaaataatgaagcccaacttgtagaagaagagcaagatgattcaaatcaagtcatgcttgtggcaaccactgaagaaagagaatccaatactgatttctggtatttggatactgactgttccacccatatgacagggagaagagattggtttgtgaatctggattcaactgtaaagagcaaggtcaagtttgctgataatagcacactcacagctgaaggtgttggtaaagttttgatcaagagaaaagatggcaagcactccttcatctctgatgttcttttggtaccaggtattaaaagtaatttgcttagtcttgggcaattacttgagaagggttatgtgatgttcatggaaaacaaaaagctgaaagtgtttgatggaaataaaagactgattatcaaggcacctttatccagcaacagaacatttaaggtgggaattcaagtgatggagcataattgctttgaaacttcagtaaaaatagaagaatggctgtggcactacaggtttggtcacctaaattttagggatttacatctgttatacagaatggtgaatggtatacctcagattcatatgccaaaggagatgtgtgaagagtgtttggagtcaaagcagccaaggtgctcgtttaaaactcaagttcccagccaatggtatacctcagagatgtggtcatagatgagtctaaaagctggaactgggagaatgatgatagaccaagcagaattatggttgattttgggtcagaagaacaagaaaaaggagatatggaaacagatgcagaagtgagaaaatcacagagaactagaaccattccacaaaggctgcaagattttgatattgtgtctgatacacaagtgaatgcagaaggtgatttagtgcactttgcattactatcggaagctgaaccagtgagtgtggatcaggccctgtaggatccaagctggatttgtgcaatggaagatgaactccagtcaattgagagaaatgagacttgggaactagtggatttacccattcataagaaacctataagtgtgaagtgggtatataaggtgaaagtgaacccaagaggagaagtgattaagcacaaagctagattagttgttagaggcttcttgcagaaagctggaatagactatgaggaagtatttgcacctgtggccagattagaaactgtgagattggtagttgcaatagcaagtcaaaggaactggaaactgcatcaaatggatgtaaaatctgttttcttgaatggtccacttgaagaagaggtgtatgttacacaaccacccggttttgctgtgacaggagaagaagacaaagtctacaaattaaagaaagctttgtatggcttaaagcaggctccaagagcttggaataagaggatagatggatttttgcagcagatcggattcatgaaatgcagttctgagtttggtgtctatgtgaaaggagaaagatcaagtctactaattgtttgcttatatgcagatgatctattggtgacaggtaagagtgagcatgaaatctgttcattcaagcaaagcatgatgaaagagtttgagatgacagatttgggagagctgtcatattttcttggaattcagttcaagaaggtgaaaaatggatatgtcatgcaccaaggaaagtatgcaagtgattctttaaaaaggttcaagatggacaaatgcaatccagcagctacaccagctgaaacatgattggtattagaaaaagatggaagtgaggatgctgtggattcaactcaattcaggcagatggtaggatcattgaggtatctctacaacaccagaccagatattgcttatagtgttggcttgattagtagatacatggcaaatcctagagtgcctcatctcttagctgcaaagaggatcatgagatatgtaagaggaactctggaatatggcttgctgtttccaagcaaaatggaagaggaggaagctgaattagtaggatattcagatgctgattggtgtggagacaggaatgatagaaaaagcactgcaggttacattttcaagcttggtgaagcaccaatttcgtggtgttcaaagaaggaaccgattgtaactttgtcatcatgtgaagctgaatatgtggcagcatctatgagtgcatgtcaggcagtgtggattgatgcattgctgaaagaaatgcaggttaaagaagaaggaattgtgaaactgtttgtggacaacaaatcagcaataaacctggccaaacacccaattgcacatggaaggagtaaacacattgaaacaatgtttcattttcttagagaccaagtgagcaaaggcaagctgaagctggaatattgcatatcagcagatcaagttgctgatattttgacaaaaccattgaagaaggatagctttttaaggcttagaaatgatttaggtgtaatgagtgttgtagaactgaattaaggaagagtgttgagatagttaattcagttagttggtagtaactgttttagctttatatggcttatatgaaactctataaaagtgtgcttgtatttttctgcaagagagtaatacagtgagtgaatgaataagtttttcctcagtccacaaaacctctgctctgttatactctgttctaacaattattaatggctacgtttcaattgttccattgcactccaaccagaaatcaacacactcgatggccaaaaattatgagccaaaatatggaagatcaaaatcatttcatcaaaaaagaagagggccaaaagaacaaaggaaaaaaagaaaaagaaaaaagaaaacaaaaaaaaagtgattttgcaaagtcagacgatcaagggtgaaggtcaaaatccaaaagggcacagaaggcaagcatgaagaagaacgaaaacataagcccatatgataaagcaacaacctttacccataatataagtacgaaaaacatgagtgatactagaaacgaaaaatgaagaagaaaaaatggaatagttttacggagaattagtggaaaggggtacctgctccggctttcgtttcttcatcccagaattgtgggaactttcgtgaagatccatcggaatcaaaggctgaactgaacccccccaacacacaacacaacacaagtagtagagagaaaggtaccacccaagtgcgaaccaagagccactcctacactccaaaagtggttaaaaaaatacagtataaatattaccagtcttgataatataaagaataaatgttttttttttaggaagagaaaaaaatgattttaagtaataataaaattaaatctttaaattttattttagatttaaaacaaaataaaattcatttaaattataatataagattgtttttagttattaattactattccaaaatattattattttatttatatattatatatacaaagtatttattaattgtcaacaagattgatccaattaataaacaacatataatagataatatataagtaatctggtcctcttttcaggtgagctctcagaaatcgaagactttacctaaactttcagtcaaaaaaaaaaaatctattaacttttaagaaaaattaatatatctacttctattatctactatatctatcaaatcatactcatattagtttaaaaaattcatgtaataaacattttttaaaataataattacatttttaaaaatttcaaatttttattatatttaaattttataaaaaaaaaagtgacaggatattaatttttactaattgtagttagagaagcataaatccaacatcgtatcattaaaaacaactaataaaaagaaactaatatttaaaataaaaaaaggaaagccataattctttcctccatttatgcaattgtatcagcggacagcggtcattctctcaatctctatatatacccataagaaatttcactaaacaacaataatatacacaacataaagtaataaaaaaattatatataacacatcgtatttgtggtacctgcgaccgcgagactttgaagtcaacaccagacggcagcaatcagccacactgacgcacaccataagcacatgtgcatacccacgtggagtctagataaccaatcaaatgccccaacgtagcatttaagacaatatcctgccgtataatattttttttctaaattggaaagttgattctccaataattttaaatcattaattttgattctttatttaaaattaagatatctaatttttctagttcttaaaataatttttttaatcctttgattagttgatcattcgggattttgatagaaattgaatgatctttgattcaaatataagataataataaatcattaagatacttgttatattttgttatatttaatcaatttataaagattatgttgtatgtatcattagtcaaaatttattattatttttaattattaaaatttataaattaatatataaattatccacataaattattttgtaaattaattttaatataaaaattattttgactctaattatataaatcgacatgactacatcaattaatataaattatacaaattaaaaaaaatattttaatatgtaaattatttatattctaattatataaattaaaaaattttaatatttaatttttcaggaaacttacatgttaacattttagttttaactataaaaaaaacatttagtattttttaaatgccaattatataaatcaagaaaattacataaattaatatgtaaattatttataatttttttatgtaatttataaaaattatgtaaatttatttttatataaataatacaaattttttatttaaattataaaaataatatattttaatttttagattatttgaatattatttttaatttacataatttctataaattacatagaatattttaaaaaaataatatatattagtttatttaatttttaaaaaacattataataaaaaagaataactttttatatataataatctattaaattatatgaaaataaaattttataatagtagtatacatgtaaaataaaatattaaatatatttaannnnnnnnnnnnnnnnnnnnnnnnnnnnnnnnnnnnnnnnnnnnnnnnnnnnnnnnnnnnnnnnnnnnnnnnnnnnnnnnnnnnnnnnnnnnnnnnnnnnnnnnnnnnnnnnnnnnnnnnnnnnnnnnnnnnnnnnnnnnnnnnnnnnnnnnnnnnnnnnnnnaataagtataaaaaaaaaaaaaacctgatggaattggcgtataatgtaataagccaaggcaattcacaaaataatatcaccattttaaccaaacaaggggcgaacttctctttctctctgtttttgtgagtttatttattttgattattgaatccaattccttttatttgttcacaaatcttcttatctttattatttacacataaatgatacttaaaatatattaattaatttattttcaattttattttaaatttttgtgactgttttaatgcatttgaaactacaaagataacctctaaaattttgagcggaaatttttttatcccctgtatatccttaattatttatacgtattagaaaattaaagaatctcttccaatccaattgaagaaacgaaagccggagcaggtacccctttccaccgattctccaaaaaaagattccattgtttgttcttaattttttgttttttgataacaaccaagtagcattttacccatatcagcttagccaaagttatcaacctttcatgttccattttggtcagaattgcatgcaattcatggaagaaaaaaatgcaatggtggattgggctaatcaagttggtgttggtgcttgtgatcctaaaatgggtgtactaaaggaggatggatttgacaaaaatcaaaactcctcaccatgctactacaacggaaatatgcaaactcttccttctcaattgcagtatgatgcaactttccagaccctaccaactaggacaaccatcaaggtttgaacttaatggtttttacgattcaaatatgcttcaattatctcaatttttttaactgcatgcatggaaggaagtagggtcatccctctactagaaacatatatgctttttgtttaggttttaattttcttaggctttcaagcatttgcttatgctttaaaaagttgttgaatttgttttcttttcttggttgagtatgaatttgaacattttacacaatatggtcttcacaacatgtgtcgaacactaacacatgtacgacacttacataacgtgtgtcacatatttcattttagagtttgaataaaagatttttttttagtctaacacgttttaagacaaaggtttgagataagtgtagtagagagtgttttgcaatcatccaaaggttcaaatgtgacactacacattatctacaaaagtcaaaagaataagaaaaagaaaagaaaagaatttgttagcaaggaagaacaaattaactaatttagccttaaattccgcactcttcattttaattgataaaacgtgtaatactcttttgatcttaatttgatttgattggatatttttcttagacatttatttatttatttatttacgtcaacacctaattttgatttaaagtgttatatattatatactttggaaatccagtattaaaaattaagagaaatgaataacattggtgatgtatataacaaagactttcatctctatattcgaagtcgccccacaatgaaaaaaaaaaannnnnnnnnnnnnnnnnnnnnnnnnnnnnnnnnnnnnnnnnnnnnnnnnnnnnnnnnnnnnnnnnnnnnnnnnnnnnnnnnnnnnnnnnnnnnnnnnnnnnnnnnnnnnnnnnnnnnnnnnnnntcccatattaaaaagggttgaaaaaataaaataaaaaattgtatcttacttttatatctctgataaaatttaacaaaaataaaaaaatcgatggttcatcttatgaaaaaagatcatttttaattttccaaaaggtatttgttttatattaaaataatatattgataaaaagttaaaaggtctcgttaaagaaaagtcaaaaacctcttaaaaagtattatctttgaagaataagtgaataaaaactaaaaacacttttgtgtaagataacttcaacttataaagaaattcattatttctatattctattgtcgggaaaacgtaaacactgacgctttgtcgctaagaaattaacgatgaacattatttttgttaccgtcttcaaacatgcattgttgtcaaatttgtgaagcagtaaataatcatttaccttcccccagaaaaattatcattgaagctccaaccttaattcggaacaaatacatattcctgtctaaatgaaaactataatccaaatcttatagataaataaatcaaagcatgtgcctaatctttagttaaatctatctttcagaaattgaagattaccaaaaagcaagggagcacagctctaggattcaaaacaataagttcttcaatctctgaatggtcattcattttctttaccaaagaatcaaactcaggatcaaccatttccttgatctcttgtagaggattatggattctcccagctattactctgcacaacataacacatattctatggagagatttattggatgagcaaatagaatcaatggctttttcactagtagaagtggtgtaaaccccaagtgcaccatgaaattctttagtggcggagaaaccatgcctcagaatttgacacacaccacattgctctaaagtgcaaagggtagaagagccatttaaaccaagggagcatgcaattgttgtaccatgaaatctcaatagctcatttccatcaaccatgcatcttgggtgctcattttgtaacctttcagctttagtccttaccatacccgtactttcctcaaagcatgcaaacgtttcttgtttgttctgaattctcaagacacattcaatctgtgctgccttgctttcgatcaagttatctttgcatatttgttggatgatcttgcaagatgaaccttctctctcaagtttgatcactgcaaaatggtacatgtagatgttccataatttcagtaaaagcacttttttaagtgaaattatatctgtaatttaaatataggaaaagaaataaaatagatttttctgtaaaagttacaaaagatcacatgaatattcttccaaatgtttcaacattgacataaatctatataattaatttgtcatactagtgtcaaaatcagaattgttcgatcgtaattggtcaaatttaatatagtgtcgagttgagggccacctttttttattcccagtccctttctcaaagtatactattgagttcctttataagtggataaattatactatgatacaggacccccacaacacgaaacaagactgattttaacacagacatcataccatctataatctataattgttataaagggaataagatattttgatgtacatgcaaatttttatgtctattttatttttataacgacattcataaattattatttcatttttataactatattcacaaaccacccactaacttgtattattttttattttaaaataaacatgaaaaaaacaattaggcactccgtgcctgttttcccctagtatgatataaagaaaattaaggagagaacaattgactcaaaacatatataagcacttcaaactcattcatgctaattcaactagttagaaaaaatacttatcccttacctgaatgttcggggatattatgatcatgttcttcaacagtgtcagtagattttagtttctcatcacattcatgatgacgagttgatattgggagatcatcattagaatctttcttcagtggcacctttttcttcgagaaaaaattacattcatcacaatcaacataatgtgttttagatgaaggtataattcgtttggttgatctaggaggatgaggctcttcttgtacaccttttccatcttcactgccttcatgagaacaaggacaacatggacaaagcataatctcaccgcttgatctatcaaggaaaatttcatggctaacatggtcccctagtgagtgtctctgcatgttattaatcttgccttgtggttttctctgagtactgctatatgccttcggatcatgaacttctgatgcatgaggtttgcaacgaagtgatttctttagaagatgccaaacctctgacatttctcttgatttcttttctttgtgacatgtaaaagattcattactaatgtttttatctattccaattgctaaggcaagtgaacaatcaaggaaaccaaatcgttattgttttcaattacagattgttttctttgtcggatcattcacaaatgggaggaaattcatggagtgcaaagtttgtaaacggtgccagctttcaatgaaaaaatacaaataatttcaaccttctcatttatttattatttaaacagtaaagattttcttttatttgaaaaaatatatataattgttaaaagaaatataaattaatatatacatgaaaagattttttttagagaaaatacttcatacacatagtagtgtaaagagattttacaattgtcttctaataataaattgatatgtgtgataagtttattttaggattttcttaattatttggaaaaaatttagttctaggaattaatgtgataacattatacattttcgaaaaacaaaatggtgatttatggtttaattttttcaactactttaattcaatttggataaaaacaaataaatatatttgaacttattttcaataaggagaaaaaatgaactttattttttattatatttatattcaaaattgcattataatatttacaaaactaaattatatttaattaactatattaaaataaaagaaaaatatataatagatttattaacttttataattaataattattttaaaagttacactaacaataatttataattaaataataatataaaattattttacactaaatttttcgttttctaaatttttattcttccttataatgacaccattattcacatttgattttatcatattatctgtccattaaatggagtaattgtatatggataaatagaatttgattttaagagttattgtggtgacattttctcaatggtagatcaaaagactaatgtaaaacgaatgcacaaagaaagaacgacaaagatgtaagaaaaggcccaattaattcttattccgttaatgtttcgatcattttcatcttataacgtgacaactatgtatgcatgccaatttagcttctactcctgcacttaacttgccaattgagcttttttaacattgttagatgactatagttaggaacgagggactaaattaattgattatttgcagtatcaatcattttgtcattattttattttagtgattaatattaacctgccattaattataattttaagaattaaattgattgataatttataattttaaaaatcactttgctattttaaaaatttcagggatgtcagtaaaaaaaaattagggaccaatttggatattataattttaaagcgtaaattggtagttgaaatcaattaataagacaatgtcatgctacacttattgaggaaaataatataaaaaattatctctctcttaggatttaatttttttttttaaaatgccaccgatattttctttaaatcggttctcatataaccaatataaaagttgttattttttgcaaaagtgaaagtaaggtaaggaacaaaatgaaactaacaagatgaaaaaatataataatcccgtaagaagatgacaaagtacaatgacatggtagtctaccatgtaggtatcacaactgggcgaggcgggagcagggcattccccgtccccattgtagtctgtcgactcaaaatccgttccttgatcccgtccttaatttctgtaggattttaaaattcatcctcattcatgttcttgttggaggttgggttttcttcgtcccgtccccgctatttgattaaaattaaaaaaaataataatatcacttttttattaaaaaaatcgaacgaaaatactaattaattaacaaaaaaacaataataaaatcacatttaaatatgagatcataatttaaaaattataaaataaaattaattaatttaattaaaagaattacaaaataatatatatttttttaatattatttgttacgggacgggtatgaataatctcatacccgcccccgcccagcttttggctttcgggaaaaattcaaacttgataaactcaggttttttctactaaaatcgaaacgaattcgggttaatacccacgaattcaagtcccgcttccattcctactagcatgacttaatttgcctatagttaagaattctgttgcaggtaaagtattagagcttggattgcgtataaaaggaaaaaatggagtaaaatacagataacacttttaaattgcggtcacatatatggtagtggttattttgcaattactaaaatggagcaagatacagttgtattgtggatggtgatggatccaatataatatgtctattatccctcaccctagaagtggtaaatggtagcaacagccaacttgcagaacacactataaaacatatatagagtaaaactgtaaagtcaatttggttatgtgtaacagagtgattaaaaatgaaggaaagattgcgaattcaatctatcatgctgacaaaaaattaataaattaataattaatgtttgtgaataataaaaaattgtgtaatagagacaatgcaagcaacatatatagcctctgtttctgcttaactcatgtaataatgtttgatcttcgtccaatcacattatgcaccatgtgctttacacgcatacaactggcactgtggcacaccgcatgcagaacatttcctttctgtacccaaagtttaaaaattaaaaaaaatgtggaggagatacattaacatgaacattatcaagtcatgaacattaacttctataaatgctgctcatattttaagatatatagagagaagatcaagaattcaagatcactatggctctagatacacgcacaaatcaaaaaaatggtaaaagaaaatattattcactagaaaaaataaaaacaacggttctagtgtcgtatctgaacctttgtcttgaatgtgtcatccgaaaaaatgattattttattcaaagttatgtgactatgtgagtgtcgtacacgtgtcagtgttcaacacatgttgaatacataccagccactacatgcaagtgctacataacaataccaggttatttgccaggttgtgaagaccattgtatgtgtaaataatgttcaaatccatactcaatatagaaaagaaattcaacaagtctttaaattaaacataggcaatgcttgaaacctaagaaaattaaaaccttaactgacaatccaaaaaataaagcatatatgtttgaagtaatgagacgaccctacttccttccatgcatgtagttaaaaaattgaggtaattgaagcatatttgaatcgtaaaaaccattaagtccaaaccctgatggttgtcctagttgattaattggtagggtttggaaagttgcatcatactgcaattgagaaggaatagtttgcatatttccgttgtagcatggtgaggagttttgatttttgtcagatccatcctcctttggtacacccattttaggatcacaagcaccaacaccaacttcattagcccaatccaccattgcattcttttccatgaattgcatgcaactttgaccaaaatggaacatggaaggttgagaactttggcttagctgatatgggtatgctacttggttgttatcactagatgggaaaagttgttgtgtttgagacatgaaatttgaggccatgtatggagtaagtgtctcagctttgtctgattttgctattctttttccctttgaatcccgctttaacatattcatcctttgattacaagcatcaagtttaacatccaaaatgctaacaaacatcctcaattgttcctctccaagagtattgtaagagtcatcccaagttgggtacatgagcttgatcttctctttgtgcactttggaaatctcaccttcaatctttttcatcctatcgttaaaatactcttgcacattatacaccttagaacacctgtcactagtggtgttttgatatttttgaatgacacgtttgatttctcttgagtcttggtcttggggccatgtttcgggttcattgagaaacttgggagcatagataactatgccaacatcaaccgcacaaagagtggaaaattcataggctttcttcaataatcctttctttctcttatcaaaagttttctcacgggctttctcctgttggatgagttccataggtattcttccacgacccattttctgcatggtatatagtatatacaacaattggcaacattcagtacataaatctagacaaatttagatgggcaccagatttttattcaaaataagcgtaaaaggatagcttttcaattcatatcaattttaattaataaaaaaactgcatgtttgttattattactatatatagcaatatctatagaacccaggcagtggcagaaatttgacttgagaggaaaaaacatgatttaatacggaaaatttaattataagatattcaaaataatattttaaataattatatatacccacactataacatctcaaatacgcataaaaaaaataataacattacaaatactctattaatatttactgtattatctatcacaccatctctaattaattagtttttttttctcgctaagtgtcaactaacacattgatgtttatacatcttttttcaatattttcttttcataaattttagaggcaccataaatttatttttataataatttaaatatagttttgaaaaaaattgggagtcactattactactcccagtcaaacccttgcctctaccactatttataacaattggagagtttggagagagaaggaagcagatatggtgaaatcaaagggtgtttgagggagaatcaattggttaaaggatcccttaggtggagggatttggcaagtatgtgtgaaggaggtcacagaggtagctggttagagaataatatataaattacatgcagtgatgatctgttagcacagaaaattacaaatattagattacgatacaaactttggtttgattctagatcaagatacaaactgatattctttacagcacataaaatttgtttcttcaatttaaactcactataattattataacattagactagagactgacattcacggtgtccatgataacgacactgctctaaaaacatgcttttttatcatttattttttgtacacacatttatattattcttgacagtgcacatcttgtgcttcaattcactgtcttagttattataatattatgatcaacaacagatttttctacacatgcatttgctggacttccttgcacacactataactttcaagttaatttcttattacttaacccctaactcttcaaactctgataaagaaactaaaatgcggataaaagacataaatttaataaactaaaactaacataacattaatatataataaaaaaaggtatattatattaaacttaatgtcttatccaaaaattcaccaaaaaaatcatgttttatccaaaaatcaaaaaatgaagaacgatgaaaacaaacatacttgtgtatccattccaaaaaaatagactcttgatttttagacatgaagaagatataaacatctcattaacacattatatttttgcaaaaaaaaaaataataatatcaaaattgtttcttgactaggactgagaaatctgcttagttttattatatttcatcaatattatcaacaatacagtcagtcattcaagctctgtagggtgaagatacaacaatggatgaagggtccaatgaaaccaaaaccacatacaacaacaaatgacattaattcatcaacatatcactatcactattataaaaatataaaactagtgtttacttcaaaaggaaacgtacctttttgactttgttccctgaccttcgttttcccgttttgtgcgatgacattttatggtggatgttattctaatttatatgagtattttcttgactcttccgccctctgatttccttcacttcctacagatcataattagtgctgaaattgccctaatttgtgataattcttgggattgtttcctttttatctttctttaatgtgacttagattatccttaattaattcgaaaattctagcccattatagaattcttcggacatagttttctacaaattttgttattttttttagtatttaatgaaaaagggacaaataaaaaattaaaaaaatttaatatcttaaaattttataaacaattaaggctttctttatttagtaagtagggaggtttgtaagaatatgtaaaatgattcccttatgttttgtttttgaacaaagttaattttattaaattgttaccaaggtaacaatattctgacattctcgcaagagtcttctgcagctaatgcatatggatggctgacatctgagacaagcactggttcccgcaatgctttccatgctccttgaactttcaccagcactctcttttgccatatgcagatttaaaatgattcctaacataacccataagttagttaagattaatagaagtatatattcaaattaaatcagtcaaataaactattaaatcttttatatatatatatattgattttatataatacgataatcaaatttattaaatttcgacgggtagttgtagtagctagaatccattcttgcttttaacttgtcaaagagattcatgatgtgcatgagaatgcagacgacatatcatggaatcatgttttgaaagagactatatatgaaaaatttgttgattagcgaaggaataacaagccttctcgattccgtctctaatcagccacggaacagagaatcacaatttcatttactagtttgttgctactttgtgatgaattagtgaggaaatatttctctcgctagctattacatttcttgtagtgagaagctaatcggattatggatgggatggtcactcatgcgttgggtctttgcagttgctatcaagtttttgaatttgcctcttcttggatttaactcatatattttgtattttttagaggatatttttttttatcgtgtgcattaaaaatagtgtcatgaaatttacaacactcacacacattatgttcaactaattaaattagactctcttaaccatttcttagatattttagtcaccttgtatattaaaaagaaaaaaagaaactagagatacttaggatcctttcctttcattttttatactccaaaattaaaattgatatatttttaatcctataatttgataataaaaaaagttttaatcctatgtccaaagtgtcctctgcccaaatgccgtcagaatgaatactttgaacaaaaaactatacatgtagtaagatgtttgataataaaaatgtaaaatcaatataggttgtcatgtaagtggcttatatataatcccaaacaagatccttaacggaactgaaatagttttttttttcaaattacaaaactaaaaaggtaatttttcaaggagatcaaatacagttatacaaactttccttgaatttaaagaattaaaaatatatctaaacctattaaattttatgaaatgattttcttattaattatacaactttccacagttatacataaattttgattttattaattttttataatttatcgtaattgattacaaagtaatgaaaataatgaataacataatttatttaattatgacatatctaattacagtaatcaaacatgatttagacattttaattnnnnnnnnnnacttgataacactaatgtaaattttaattcatatttatagtaaatttaaattgagaatttttttaagatttattttattttaatgataccaatatatgaaattgagaacataaattaaaaatgacaatttgtagggttgtgggtaaggtactataatacttaatcttttacttgtattttaaataaatctttatatttgtgtggataataactttaatattcttgtctttctttgtttagtacctcaatctccataatcgtattagttgtccatgttttaattaatatgaaaaatcaatannnnnnnnnntagtaagatgtttgataataaaaatgtaaaatcaatataggttgtcatgtaagtggcttatatataatcccaaacaagatccttaacggaactgaaatagttttttttttcaaattacaaaactaaaaaggtaatttttcaaggagatcaaatacagttatacaaactttccttgaatttaaagaattaaaaatatatctaaacctattaaattttatgaaatgattttcttattaattatacaactttccacagttatacataaattttgattttattaattttttataatttatcgtaattgattacaaagtaatgaaaataatgaataacataatttatttaattatgacatatctaattacagtaatcaaacatgatttagacattttaattnnnnnnnnnnntagaatatggaaaagtaaaaataacttgttggtataaaatattaattaattattttaaatcagtcttaattatataatctcatatatgcataatctatcaatctctcacatttcggtgtgactcattcgggttgttacattctctaataatccaaacttcattcctaatttaattactcaggggtattgattaatagagaatcaaagtgaattattgatataagttggttgagcatagtgtaagtgttttataaattcttagtattgtcttcgactctatgcataaaaaatactaacttaaattcaaaatcttttcataaacagtgtttcctcaacctctcatattttacctatgtgtttcataattagaatcgtcgctccctattaactcataagcatatccatctttaatgctatcaatattagctaagttaagcgagataaaggtctccaccaccaataaaaaaaattgtaatagttttcgcagagtttatacgtgtcaagtaataatttcactaataattatattaataaataaatgtttttaaatgtgtgacatagaattaatttttcatttataagtatttttaatcaaacaagcaactataattttcaactctaaatattaatgaaaatagtgataatcatttcaacagtattatccattgtaacaatttttgtaagggtaatttcgacaatagtttaatttatgataattttaatagaaaagtcttttcgataataataatgttaatgataaattcaatcatatatgtgataataattatagtaatgatttcaatactaataaacaatggagattggataaaattttagtagaagaaatgaatatttacaaaagtaaatatttcaagaagaaatgagaattctaaagagattaaggattaaaagagatacaaggaagtaaaagaaaacaaattttattaaaagtggaacaaagacgtacattgtgacctttgaaccaataaccattttttgtgaacaatgtgagtggtgtataaaaatttaagtggtagtgatttaatccaacgaaaatgactgtcgaagtcttatttataggcttataatattaatgatcaaattatataattttgacatgcatacaacaatttactaactccctacatctagtggcgttactcatttgttcagagtaacaattacaaaaaccaaatatgttcagagcccacaaacaagattcatgtgaaaatcgaagaacactttgtgggcaacgagaagaggaaaacactgggcactgtagtggttcttccaatgttgggttgtggggtaggggttgcggacaaggttgaggcgggagaggaggcgtggagggaggaccaaatcttagatatgagggggaaaaacgaaaaaaaggggagaaagaaaccgacgccggtcaattggtctccactaggaagttgctgtgcgttacactggccgtcgacaattttcgaagaagcagccatgcggagacgaagaagcagcaaccgccgtagaagaagccattgttgtagtggtagagttgaggacggtgacgagacgacaaatgtgacagatgaagtggtcgacgatgcaagaagagggggaggcgatggcagaagtccgcgagcttgatcaaggaggagtgattggagatgacggggagagagacgcatgggtggtgccgttttgaaataatatatgttttttattttttttctttcgattatgaaccttttatttccagacactttgatgtttcaccggtgaatccttgatttttggacttcacattaaaattcacctaaaataatagtcaaccaaaataaactaagtttttcaaactttaaaagttttcataacaatggtaacactttcacatcaccaccctgcataccataccaggacactccacaacacctaacacatcaaaattctgcacatcaacatcctgcacaacatcaactcccagaccgtacaaatcgacaccttaattagcggcaccatgcacatcgacgcccaactcaaaccctaacatgtctaaaccttgtaattgagcatcttcaccatgtttttctatttgtgccgtttggaggtttaattttataattctggcttgaataacagttgaatccttataatgtaaggttatttgtattgatccattaatttttggttgtttttattttttttcctttcaatttttggttgttataatttcccttttctttttggttttgtacttataattttttttgttagatttgacgaaacaaacctaacaaaacaaaccataatcaaataaaaagaatataataggaacaggaataattaaaaaggaaaaaagtaaaacacatggacattttcttataaaaagttatttaaggtttgaatattcttctttgggacttaggagagatgctcgtattagaactcaattagtgtcatgaataggatttttttttttcagaaagagaatgcatttagtaaaccaaaaaaatttaaataaattattatacatgataaaaaaaatttatttgaaagaaattttttattatatcaaaagtagtaaacatttattttctgaaaattctttttttgtgttgacttttttaattttttaataataaaacgtaatattttctgtttttttttcataaacaaatccaatttaaaaatatgtcattatttgagatttgagatttgagataaggtgatggatgtattttaagatatcctcttaactcgtaataatgaaacgataaacgtcgtgtgtacgaatgggactatacacgtgttaagagcctattcgacaaaacacgtgcttctttcaacccacaactaccccatggcatttccgtaattccggggcgagagcgaggtcaatttcaggaagtcaactctttgaaaaatcgaaaattccccttttcgaatttcttcttcctctcctccttctaccattttcctttcactttccatcactttctctcgtttccccttcgcaattttccccttggaagagacatcgaagaaaatcacgtcacggcaatggaggaaaagcacgcagcagccatcgaatccgcacacgccgaatccaacggcgtctctcacggcgccgaccacggttggcagaaggtgacctacgctaagaagcagaagaagaagaccgttaacgcggccaacagcgccgattcccgcgcgaattccaacaagctggttccgaatggcacgctgtccggcaacgatggcgttttccggtcgcttgagctgcaatcagaggaccggcgccggaaaattgtggaggctaagaagctggccgatgccgcgtacgacgacgaagacgcgcggctcagatcgaagcagcggcaccgcgacgacgacgaatacgactacgatgacgagaatgtggaccgttccgcggagaacgggaaggccgaggaggcgaagaaggtgaagcagaagaagccgaagaagcctaaggtgacggtggcggaggcggcggccaagatcgacgccgctgatctgggcgcttttctcgttgagatatcggtagggcattgtgaattgaatcgtgcgtgtttaggttttttgttttttggtttgatctacttggatcaggaagatgatgtgatgcgattcgattcgttttatttgtttgttttcacaacagggatcgttcgagaaacagcaggacatattgatgatgcgattcgctgattactttggacgtgctttttctgccgtgaccgcatctcagtttccctgggtgaaattgttcagggagtcaactgtggctaagatcaccgatgtgagtctcgaatatcttgttttttttttttgttctttattgtaaatattagaaaaagattttcaatttgatcctttcaagatgtttatgtcgccacattagttcttattcaaagatgggttgtcaccacattacatctttgtgaagttcagtcacattattctctaattaatagctcataaagaaattatttcaaaagtttcatagcagcaaatcatttacttatttgcatttaaattattcgagtctgttaagtacatttgcggtatagaagccaaatgttagtatctttggtgaagtgaaatttaattgagatgcatattgatgctttactaaatctattgtgatattggttcatgtgattatttaccgtatttactgttttaaaattctatctttggcattagaatcttgttctagtttctaatcttcgcctgtgatgttgattaatgaatttcctttttgctagatgccactttctcacatatctgatgctgtatataaaacatcaatcgactggattaaccaacgttctcctgaggcacttagtacctttctgatttggtctttagatagcattcttgctgacttgggtagccagcaaaatgtggccaagggttccaaaaaggctgtgcaacaagtgtcctcaaaatctcaggtacttatactatatactcttctctgtcaagaactagtgtttttttccccttctgattattattggataacagaaataacttgtattagaagataatatttattagagagaagaaggaaaacgaaacactcttgaaaactaattggagggccactcaccaaattgaaccaaagctaagctaaaaagaaaatacaaataaagaatagctgttcactctgcaaatccatcaagggggctctctggaagaacccgtgtgctgaacagctaagagatgtcaattaaacaatcttgtcccaaagcatgattaattagcaaaggacaccttcctttataaatccaaatattctcttttaaccgaatgcttgattagtgcatgactgcaatgcatgactttgaaattctatattatgccttagtgcgctttgatttattaattaatatgtttgtgataagttgttagttttgatatgattatctctgcttttaagtgttcaaatgactggggttggcgtaaattaagaacatggaggaggcagtgttgctaaattttatttttagttctattttttatttttccattttgatcttctttgatctgtacactcaatatgaatgaatagtcaatgtcaagatagataacacaagtacgtgctcttgagataagcagtaaattcacaggtgccctcaatgcatgactgacaaacatcagaaaatgaatggtgaggatgaggagtaactcccaaagagttactcttggtgtaagttaatccctcctcacacacatacaacatgcatcaaatttcctttttcctttttttcttttggggaatgggcattcagttacttagaaggtcaaatatccttgttcttagatttctattgctatttttggttgtgctgtgaatggaaaaatgagttagctttcattattcaatacttgtgtttttttctctctctagaaattaaaatgcacttgaaaatggaaaaaaaagaaaaaaaaagaaatgcttccatttgaatctccattaggttatgtttgttcattgtagtttgtgtatcttctgattttattagtttgtttttgtgatttttttattgttaaatttgacttgaaatttctttttgtaattttggtttctaaatcaaattcaacctttacatgactatttgtaggtattcaaatgtagatatacttgtctgttttgctcttcttttaagctgtagactgatatttagttcacataaccgcaggttgcaatgttcgttgttttagcaatggtattgcgtcggaagcctgatgctcttatatctgtattgcccacattaagggagagtacaaagtatcaagggcaagataagcttccagtcattgtatggttgatagctcaggtgaggggtacaagccaaaataactaagatcttataagaaatcccaaaaaaataagtttgactttttctgcgtagcatttcattttcccttcattttattaatgcttaatattttctgagtaggctgctgtaggagatctctcagtaggtttgtatgcttgggcacggaatctcctacccatagtgattggcaaaagtggtaacccccaatccagggatttggttttgcagctagtggaaaagtatgtaaatatagctactttcttttttaatatcactatctcattattgctattgtcatcaccattgtgttttctgtggtttgctgtcagaattttgtctacccccaaagctcgacctgttttagtaaacagtgctgtgagaaaaggggaacgattaattcctccttctgcttttgaaattttggtccaggttactttccctccatcttcaactagagtaaaggtagatgttcgactggttttgtatgtttgtattttagagtatcatagctctgaatcttcaaaatttatgtcaatatgctgcttttgtataggctactgaaagatttgaggccatatatcccactctaaaagaggtggctcttggaggttctgctggaagtaaagcaatgaaacaagttgcactgcagatattcagttttgctatcaaagcagctggagaaagtatggaaaagtgatttttttattacatttgtgcttcttttcttatttgatgaaatgaatgtttgagggtattctgaaacatactgtatttttcagataatcctgagttatcaaaagaagcagctggtatttttatttggtgtttgagtcaaaacactgaatgctacaagcaatgggtgagtagtttttgtctagaagcttaccttttcgagtttatgcaagtgattgatttttttggatagagcaagaatatttgttatatgaaaaaatttctttgcattttaaaaatatatatgacaatttgatacataatggttctgagtatttgagaaagaatcaaataaaagataggattttgttgatgatatgacatctcccatatagccctggataagtgatgaacccgtgttaggaggagaaagaataaattcaaattgttcctcaggatttcttgagccaatcagtgcgagatttctcccccaaaccaatctctaactaaatccaacaaaacctccaatcaactctgcctatctctatattgccgctgccaaattctgatagaattctttccgacactcaaacccttaactccctcaactaacaaaaaccagcccattgggcttattacctaacacaatcataaaactagattttacttatttggtattattccttattgtatatggacaggaaaaagtttatcaggacaacattgaagcaagtgtttcagttctgaagaagctttctgatgattggaaggagttatcaacaaaattgtctcctcatgatccactgagggataccataaagaacttgaagcaaaaggtagttttacaggcaaaagagctagactttcagtttattgcatctgggtttgctctccagtctcccaggatggactggttgaattgtgttttattgtactgaagtaacagaatgtttgaagtaaataatggattaactttttttggctgcagaatgagaaagtattggactctgagactgatgctgctcgtcatgcacacttcaaggatgccgataaatattgtaagataatcttaggaagagtttcgcgaagccatgggtgcatgacttgtttaacctttacagttcttgctttggctgtgggtgctgctgtttccttgtcccccaatttggaatctttggattttaagaagctctcggaacttttcaacgttcagcactgagtactctggagaatatcccgcattaccggtagttggttgcttccaaacggcaattttcttttcagcccatctcattcacaaatcacaatgggtacagtaaaccaatagcctcataataaagtgctcaatgcggagattgtacacttagttcaaatcctgttcggatgacagagaatagttgaggtcaacaatgctttgaggtttactttagtttgacctttttataatttatttgttgttgtttctgttgagttttaattttagttactatgcctttacattaacttatgctggcaaaatgccaattaggtaactacagctgtatcctgaagttagttattaatcagaggaattttggtggtacattgcgagatttttctctaccttttgctctgttatcatgggtggatgattgtgcccttttctgttgccttttccctggtctcgatgctttgtttttcctttaattgaacaacattattgagcttatcagatgatcgatataaaatcaggaatgtgattttttttttttagtgtgagaaaggtagaagttgataatttcgagtgaataagcgcttcttacatttttaaggctctcgatacagtagcatgatgatgccaagtacaatctttttctatttcagagacacttttatatttgtgaaaccacgtattttgatcaattttctgaaatttgcattgcatgatcgatatcataactacttatctcgattcaatgaattttttgttaaacttattacattacattaatgcccattaatttccacctcagcgcctcgctcattaatttgaataacttgacattatacatcaagattagttttattagtttagtgaacaaaattgttgaattcttttacggattccaatccatgttgttccacatagaaagtgccattttgaagggttacctgtaaattttgcaactgaatcccacttaatatattcattttgtaatcaaaatcagaaaaacaggtataaccctagattcacaacaatgtagttttggggaactgcacatctatagaacatctgatttgttgtgttttggtcttgatctcatagattatcataatcttcaggttcggcatatgggtactttgcgtatgaacttctaatttttgaaggatcttcaggtacagaccaagggtactgcaaggaagggtcccgtgggaatttcctgaagtttaaaaatggtgcccaaagaataaccctgcaagaaatcacatttcacacattagtttgctagcttttagaaatttgctgccaattcttgaaacaaataatttcaaaagtcatgcaaccaacttaatttgtagatttgttatcactgcgcacaattatactagttgcttcatccttatattataacatgaaaaatgctcctaattgaaacctgaactcagtggagttacactgtagtcatgcaaaatttcgaattagagtagtctcttgacaaagttagacaacagtacatatattttgcttttagatgaagagttgctcacccggggaagaaaatgaagacacacatgaattgaaaatacatctccagcaagtttcttcggtaccatcttttccaaagccagtacatgattattggctgcaattcactcactatgttctgctcagtcacatcttggtaagtacataagagcaaacttcaaaaattgtgaaagaaaagaacttactggcacgacaaggaaatatccaaagagaacaatcccccattgtgtcaaaacccagaggagttctggccggttattctctccagtcactgccaatactggctgctcagcctgttcaaatagccacactcaacttttgtatgtaaaaaaaacaaaaacaatgaagaatatggcaaccactgtaacctcaaagatacctgtttaaggaaactttataaagttgttttttgaaagcaaaatgccaatcaaattcaatgatactggttgaagaatcaaaagtgatattttattgaaaagtgtaacagtgcatttcactgcaatttccaatacaatctcaacttaagactttctacttgacgattctttaaacattgattagcatgatcctttttagaaatgtaagtttttttttttactattcataaaaatcaaagacaggtatcaaggaaatttataataacttacactaattactcaactaacttaagtgagttacacccctttattcttagaaaagtgtaatttaaagttaccaacacactcttatcataattttcaataaaagttatctattgattaattactatttaactaggatctttaggagcttaggttacttgtttgctggaagggtaacaaaaaaactgaatttctatgtacacgaatctcaccaaggccaagagtactcctatttgcagtgccaaacttgcatgctttaggctgccatcatcagcatgatttggtttctggctgctgcatgttatctgcaatgggactcatgagttcaagttggacaagtttttcaatgaaatgaggtaaactagaattatagagaataagttggcaaaagaaaataaaagtacacgtagtgattggcaagaactagtgttgttgtggtatgatttgtgcttggaagaaaagaagagagaagttgttccacgtgatgaagagggaagaggaggcagagctttgggaacatggagattgaatgtgaagctcatttttggtttagagctctcacagtttggctccttatcctttttctcacttcagtttcatggcaatgagtgaatagccttctgaggaaaaaaaatgacaaaattaaatgttgattgagatgacacgtggacataagactcatccacctcctctttttcttgtccattcaaagttttgatgagggtaacacaaattcccccaactctttttatagtttgtggtcaacataaatgtactgaattttgcaacaaaaataaaactacaaaaactgttgaactaaaatagaacatggatttttacttctaatattttttacaaattaatttgtttattttttttaatatttgtgcattaaaaaaattgtaatccttgttggtacattgagactacggttttaatgtgagaaggctggtaagaattcaatcactgggttttaaaagatagaagtagagtgtgggaatcagaagttccaacggggagacaattaatatggctttaatttctccttcaaacagtcgtgaacattttgtagttcaattctcatccacgtgatacatttttcttttcatgaaatgaaaaacattaatatttcatcaacaaagttttccagatgtgacacccttcccattttaggcattttcaaagttgaagaaccattgttgccttataaatggaggacgtcacacctttccttaatcattttaaatttgaggtgatgttacagttcttgaaagagtcagattataccaatgaaccttagttatagtatattattaagtatattgactcatacgacgtataaataacttctatattttatcgagagtattttagtcgtagctgttaagttgtttcctaaatttaagaattgttcataactaaattcactattattggacctattttaatttcttaaagagttacattgctgtggtaaaatttgttaaaagtttttaaaattgatatggtactataggatctataaaaaagagataaaaaattccaatgatgttcaacttttttggttttccatatgtataatttttaggaaaaaatactgtctgatatactgtaaaatactatatgtggcaacctgttttaacaaaaaattgaatattggtttgtcagattgtagatgaatagttcatttcattagatttaactttcttggttctaatggtgtttacggtttgaagatgttctaatacttttaagaaaatgaaaaaaatttaaatataaaaggtatatactttaaaatttaagtaaaaagttaatgattttttagtcccggaaaactttccaaatttttggttttagtttccgacttttaaaatattgatcttaattcctatatattttttaaatacctaaactttgctctctatatagttatttgattatactataatttatatatacacacatatatatatataaaatatttaataatatgtattttttaaaactgaaaaataataataaaaatataaattataaatttaatacaagtataaatttataattgaattaccttcacattttgattgcacttttaagttttatcttatgtttcattatatgttgtataacaatttcctctttattaaatttaaaaagtataatataatgaatttatatttttaattattttaactgtgcggcccaagatgataatggtaccaaacttgatgtgtgtatataagttaattagtaaaaattatataaaattaattttgtatgttattattataataataataattaatgttaattaatgtaaaattagttatcattatcattaaagtgataattagtataaattgtgtaaaattaattgtttatttgttattattcttataataattaagattattattatttaatataaaaattaattttaattttatgtatactaataataatttttaaattattatttattaaaatttaaaatttagacagttgaatatttataaaagatgaaaagaaaaaaaaaatccaaccccatttataaggatttctgcatctgtgcctgcaaactatcaatggttcatttgagtatggggtactttcaattctttgcaggttacagtgattttacgaaaaaaaattctgaaaagagatgaattgtgattcgtaacaaatctcaccatttatttgtcgagctttattaactaaattatatttaaaaaagatctccgccttagatactatatttcgtgctattcgtgcaaggatttattcgtacgaaatagcatcactcgctatttaatcactttcatatgaaactgttgcacttccttgcttcgtgtgaatttcgtgcataattttgttgtttttgcttaaatttctttttcacttacatagtaaaatcgatcccaaaataattgttattaattagtaattctaaaataatacatttcctaacaataaatgtgaagttaatgacaagaaaagattccatattgttggtatcaaatagttataaattataatatttctgatgagtgatgagccgttgggcatgaaaaaagttatatatttttggtttcttacatgaactgtaaatcatatgtatagataattcatgatgatcgtattgattagcttatggtggatctggcctttacgaaacgtagatcacatgtgatgtgggtataaatatggaagcattgttgttagctgtcaaactttatgatatcatattattagcacgtacaggtacagccaagtagtttcagactcactctgattctttctcagctcctgcaaaatgaatatgaacttgaaaaaagtgtgtgaaaaaatttaaatcaatatttaatttattataaactatatgaattgtattttttttataaatatgaattataattttaaagtaaaacttatcattctcctgtgtgtaaaagaatgaatgatgaatgatacattacgactttcccccctacatatttacatttcatcaaaattacactcgttaggattattctaatagctcaataaatctttgacaaaattgatataaagattcatcagcgacctagaaaaggtagatatgaaatttgcattataacatagaaaactaaattatatactatgttttatttgttttaaagggaatgctaaaataaaaatctttagttttttttttattatttacactgctctttaagtacttttagttataactttctaatcacccattagacaagttgtttttcaaatgaaatcctaatctacatttttatttgtttatttgtactaaattaaaacatttaaaaattcactcttaaaaatacagcattgttaacattaaaatataaaaaaaaacgcaataaatattctcctttttaataaaaatttaccacttttaaatacttaaaactaatattaagattaatattaatattttgttaaaataattagtctagagtgtaactatacaattgaaaatataaatattacatttctatgtttcaattaatacattgttatgtttccttaattttgaaaaccacactattaaaattgagacacattataactcctcaaccccaaataaagaattcttttaaaataaagaatacataaattcagatagtaccaattgccaaattataactacagttggataatctaaatcatttggagcttaagacagccattccttaatagccacttcagttgcgattggagagtgagaccaaccacgaaattactttttcccttttcatcaaccaatattcactttcatcctacacattcaatgcccttgattacaaatagttaacaataactaatcaccaattattacattaataagacactgacccttcctgcccttatcataacataaaaaattatcaaaaacttttgaaattaactaacagtgatttgtatctctaaattagataattcatgattaattcttaattgatatttagtatgaaataaattatattgtgagaaaaatatttattttatgtatattcataatttctaacaaaactaatcactctaattagtatcaatactatgtcaggaaaaaatcataataatactgttaaattaatagtaataataaaaagaagaaagttttaaaaagaaaaaaaaaaaaaaaaccnnnnnnnnnnnnnnnnnnnnnnnnnngggccgctaaaagccaaggttgtcggaattggatttgattcttcacttgcgctgagtcttaccgatttttccgatcaaagttcctcactttctctctcttgatcgacacccaccacgcgttagagagagaaaaacccgagagatcggaaaatgggtacgcttcagtcttggagaagagcctacggtgccatcaaggacaccaccaaagtgggtcttgcccatgtcaatagcgattacgcggtaatttccctctttccaaagataggatctttctttgctttcgattgattttggctatgtggggtggtttaattggttcttaattttaggatttggacgttgccatagtcaaagccacgaaccacgtcgagtgtccccccaaagagaggcacctcagaagtgagtgatttgtgggctttcagatccgaattaatttgatcttcttgttgttggtatggaaagatgatgatgaagttgaatctttttttggttttgttgcagagattctgtttgccacgtctgctgtgaggcctagggctgatgttgcttactgtatccatgcactttcgcggcggttggcgaagacgcggaattggacggtaggattgataatgatgatgatgacaaagtttatgtgatcgcttgattgatgtgcaatttgattttgtttgagtattcaatgatttgtctgtgtttttttggacttggattcttgttttacttgatggattgatgttgttaggtttgaagaatttcatggtaggaaaagagaaaatagagattcaatagtctgaaattgatattggcttgctgatgtcagaagatgtgatacaaacttttcaaattcaacaacatatcctgttagaaatccggctaaataaatgtgaaactaatttggattctcttttgttttttcctcttattgcgctctggtgttcggttttgtgctatttctgaattttgataatgatttgtggcatgtggcattaatgacaccaaatggtgaaaggaaatttttatgaaggattgaattcaaatctattttgatggatgatgcaatagtggatccaattttttgataattcctgttcttattcatgttcttattactatttactactaaaggctgcattttccttacattttgttaaatttgttatgcactggtttagatagccatctcttagaagtttattgtatgccaaaaaattgtattcacttattccaaacatgttatgaggttttcgttgtcgtttttctcaattctcataaattattaaaggatcaagcagtgatctgatgtccagccttcctttttattcttgtgccactattggaccctacgtagaattcctaaagtggtgtttggtaattttggtgtgttttctgatttcatttcagttgatatgctttaaattaaaaaaaacgccaccttattttttttcctgttattaaacttttgtgaagggaatcttgaaaacatttttttgacttccctagtagttaatttctagattcttccttgtgttggagggaatagggttccatgaaacaaaataaccattattttgttctcattttttcccttaaaaattcttggttaaaaagtaaaaacatggtagtttctcattcatgtaatggaattcctgaataccaacattgtgttggttattgcttaagatgttttcattatttatatgtcaactgactgaactgagcatctaatattactcattattcctcaggtcatattgtctaaggattatatataaagaatttatgcctagtcctctgcaatgtctcaattttatgagtctcaactattttcttataaaatgtattttagcatcagttgctagctcaatttcccttgtctagcctgtaattatataatgtgtatatgtagatgtagataacaagatatgcttttgtttcactaccctgcatcttgttcacaggtggcattgaaaacactgatagtcatccataggttattgagggagggtgatcctacttttagagaagaacttctgaatttctcacaaagaggacggattctccaactttcaaatttcaaggatgattctagtccaattggttaattttttggccttaccatctttatgttttgtttattttacatatgggcttaagttagatgtttctaactgtactatatactttttgccatatgatttcatttgcttgcagcttgggattgctctgcctgggtacgtacatatgcattatttttggaagaaagacttgaatgctttcggattctgaagtatgatattgaagctgagcgtctacccaaacctgccgaagggcaggagaaggtaatttcaatgaacccattattatactcttttaggataactggtcaagtttcgtgtatgttgcatctgatgatgtctttatatggattgagaagtgtttccatgaaaaccaatactaagacctaaggtgaatagtgaatactccctccatcccataattattgttgtcttaggtttttttacacagaccaagaaaaactaataaatggatgaaaaagagagtagcaattttacataattaaccttatcatcattaattatttttagtctttgttgcccatcattaatattataaagtgtataagtggaaaggcaattattattatattgaaaagctaaaatgacaattattttgagacttattttttattcttacacgacaattattatgggacggagggagtgttggtaccaagcaagcacacaacaattgagaaaacagaaagagagaaagggaagaaaaaataacacacagtgtttaccctggttcacccaatgtgggttacgtacaacgtctgcgagcggcttatcttctgaaggcgaagtatgagccgtacccaacagggagtactattttctctgactgtcacccttttccctagacaaaaatcatcctattgggagtgaaaagcttagtttgtcttgaatatatgtattctggtgttgaaaatcatcagtagtatttcagtgggtgttttatctatatgtttttgttgtctttagaattaatttggatttggataatacatttactaatgggttggtgtggtgtaatttgttctttctcttgatagctgtgtcatgtgctggtgtagtttagaaacgttagccaacttatttgtcgttatgtgaaagtttggggttcttggtgtacagttgacgtatatttcacccttggaactgtttctcaagataacagcaatattttggcaagaagtcctttctgtgtgtgtgtgtttgtggtagagtcctaaatatcaagaatcagttacatagattatcaatagttagttacagagattggagtttggaaggataggtatttagcttaaataggaggagaggttggaacaattagttagtttagtgctagaattctgcagagatctttgatttgttggtattgctaaaactaaactactaaattacgaaccccattggccggaggcttcacgctatgcgtaggtaaggagaagggatattgtacgcagccttaccattgcatatgcaaagaggctatttccggattcgaacccatgaccaacaagtcaccaagaaacaactttaccgctgtgctagggctcgccctctttgccatggtggaaatacaatacattatttacattattcgaattgtctatatttattgtttaaattggtttgcattgctgatggacattgttaaaaacttctaaatggttagttgtggatttttttgactcactattctttgattatttgcgtttttgaagcaagttgctttctgattttgtattgtgtttgtttttgaaagtcttcatgcttattttgtttttcaaacaggggtgcagcaagaccagggatttggatagtgaggagctattggagcagttgcctgctttgcagcagctgctgtatcgacttgttggttgtcgggtaatattgtgaaatgtggatattcattatcttatgttattatttttttaatttcaccagtttatatcatttggtttaatgattatttatcttattactgcttttttgtagtattttctcgtacaataaaaactgattgtatgcttcattttacagccagaaggagcagctgttagcaattatgtgatacaatatgctcttgccctggtatgttttgttgtctgtttatctaaagatcctctttgtattgagctagagatttagagtttacagataggatatataaacgtttggaatgtaccatctatattagatttttctgggcagagaaccagagagcatttatagcgcatggttgggaaagatgggggattctttggtttgactggaactgtattggttgatcttgaggttgtggaatactttttcttttatttcatggattgaaacttttaagatgtgaatattgggattagaaattgaactttgattggaatgccttccaaactttcacaaccatttattgatgcttcttccatttaaagtaggactgggactatcctccatatttggttgttgataattggaattgatatcaaattgctacatctaaaactatgtttaggaaagggaaagcatgttggcaaattatcatcatagttaaacgagtccttgttagtaaatagttgtgaatttggagttgatgtaattgatcaccaacttgatattgatctgcttcttttgttctttctaggtactgaaggagagctttaagatttattgtgctattaatgatggcattatcaatcttgttgataaggtaaatgggcttatcattatttacatgatgagtgtcaagtttaaataaaatgtgttttatactggaaaatgataatttcctttttgtagttttttgagatgcccagacatgaagctattaaagcccttgaagcctataaacgtgcgggtcagcaggtgatattttgctgcttgtatttctttcagttaaccactggcttttgcattttaatttcatgatttgttgcttgtataaaacacccaaactgttgcaggcagcaagtttatctgatttctatgatgtttgcaaaggattggaacttgctaggaattttcagtttcctgtcttaagagaggtatgcctttatgattatggcaatctcatgctttgatttaacaatttattcctgttcattttcaatttagggttccaattattttcattgttgatctttttagcctccacaatcttttcttaccaccatggaagagtacattaaggaggcaccacgagtggttacagttccaactgagccattggttagtacatcatttattgtgtttatgtagagcatagctgttatatttcctttgtaaattgatttttgcaatggttatgctgaacatttgttggccaacaatgtatgcttttccttgttttctttcacattcaagttctagccactaatttattgtgctgtatgaacagcttcagttgacttacagaccagaagaagttcttgcaattgaagatgccaaaccatctgatgaagaacaggagccaccagttcctgttgataataatattgttgtctctgattctgaacctgcacctccaccaccaccaccaccttctcacaacaattttgaaactggagacttgctggtaggtttttggatcccaaagttatctgttattttttgtatgatttattttccttatgctgtccttgttgcagggattgaatgacactgcacctgatgcatcttccatagaggaaagaaatgctcttgccctagccatagtccccactgaaactggtgagttttgtttttggcttctgctcaaactctgctggttagaaaggtttagtggattatgttccagttttgcttatctatgaaatgtgactgtttcatgcatataggcgctacatcagcttttaactcgactgcttctcaaacaaaagattttgatccaaccggatgggagcttgccctggtcagcactccaagtactgatatttctgcagccaatgagagacaattggtaggggaccttcaagtgacctttctagattgttaatattaattaatatccattatatcatcctatgaagttacattgttcaataaattgtttgttggcatatactatgaagtttactcagttgtcaatatatattgcataaatttgatttggtgttaatctactgtttcgacggacaaatgtgcattacatgcaggatttgaggggtataaataatttgattgtttatatctgctcttaatatttttaagacatttgatctgtgaatatatgctttttctcataccaatagggtccatttgttaatattcaatgccactgtatctgataaaaaacagtgtagatgcctagatggtccatagtgaatgatgagaataacataaatctctctaacttgagctgtttgtcatattttaccattgaatgtcaggctggtggattggactctctcactcttaatagcttatatgatgaagcggcatatagatctgctcaacaaccagtatatggagcaccagccccaaatccatttgaagtgcaggatccatttactctatcaagcagcatccctcccccacctgctgtccaaatggcagcaatgcaacagcaagcaaatccctttggtccttaccaacaaccatttcagccacagccgcagcagcagcatatgttgatgaacccagcaaatccctttggagatgcaggatttggagcatttcctgcctccaatcctgttcctcacccacagaacaacaacccatttggaagcactggcttgttataagaatgcctttttgaacatacaaggatgtatttaatcaattaagttggttggttggttggttttgagcaaattgtaatatgtttctcatttgttgctagatatagatgttttctggaatgggagttgtgccttgtaaaatcgagacaacgcacacggtgtattaatcattttatgatatacataatggtgggatagctttctttgaacatttcccaactcttaagtaattggaacacttttacacatgttcatatatatcgtattcagtattcatggtatggttctacactttgtattagattatgtgtcagtgtcacgttatagctttcatttgacgtttcttgtttataaatgggggcggggggtaaaattggagcagccagaggttgctgattctggtcatatctgaccaatgccaaattgccaatgattcagattggaacactaaatgcatactagtatgttagatttgatgtttgatctacatggatttagaggtgtactttaaaatataacgtgcattgtactgttgacaaaataaaaagatttaaaattatgcaaaatgcatgactttgggttgaaacttgttggattttacattctagttcacgggttagaactgggtcagagtcagtgatccgaggttgaagataactgcaaatgcagtttgacatttgtcgttttatgtgttaaaattaatgaaacagaaaccgcccgtaagcgaatttagcgcagtgtcaaggtgcgtttcctatagttttttgtctgagttcgaatctcgcagtatagggtttgcctaaacagctagttatgttggtgttgagtagcaattgtcacgactaaacactataaaagtgaatgaacagttcacaatgagccattaatgaacattaagtgctggctattgacgtgccagcccatgtgtagatgcaatgatggttgatagtttgatgacttaaaacaatatgaacacgaaaaaaaatcgttgcatgtttatatttacataatctatgacttagaattataagttgatttaccaaatttttttttgtcaagtttaatttttaatttttaatttttatcgttgcaaattatcttttatattattataaaattatgttattgtaccatcaagtacattaataaactgacagaattgttataatttaattaggtattgaatttaaatcctaaatatgtaattgtattttttttttatttaaaaaaagacatgcaattgtgttaattacacaaataaacttaatttgtcatatccaatttgatgttgggtattgatcaaaccctcaaaacaaatcaaatcaaatgcggaagggaaaaataaagacacgagaaaaacaaacaatcaagttgtttaatttgagaaaaccttcctcaatgtgaagaagtaaaaatctataggatactaatctaaaatcaaactttcattataacaataatgattacataagatcaaatatataccaaagtgatggttcactcaacctctcaaacaatggtgataatcaaactctctaaagtgtttcactcaaactttctctaaagatctcacaaatgcaaaacacgtaggtttgctcaaatatgctctcaagaatgtcatctctcgtctgaatctctctatgttgcgttgtgttttctctcattctctcagtctgatcttatctgactctaacctaatttcatcctcaactaatgtatttatattgggaaattaggtttgaggttttagacctctcaaatggacttggaccagcattggaggagtaaatccaatccaacacttgattgtcttttgtgaaagatataaaattatgagataattttaaaagaacttaatctcttataaatgaacaagtagccaaagcaaacctgtataaatttaaagttatatattaaaataataagtcatcttattaaaaaaatgtccctagacctacaatgtaggtctatccctgcctataagaaagagaaaaatgaaagtgttgttctaagttcaatgatgaagtttgtttgagcatgcttactagctactgtctaacaagtacttgagcacatgaacttataaatatgagtacggtgcacatatattactttcaggataatagttaccccttgtgtccccgtgcgtctgtgcgtgtgtaaatttgtgtggtatggcatcatgaagtgggaagagaagagactcaggaagataaagagagggttattggtaggtagaaggagaggcatcaaagagaaaaatatggttaagggaagggtgaaaaaggcaaggtgaagaggggacctttgtcctacacatcctaacactttcaagtcatcatcattgctaccacatcccttcatgtaacttagattaattaaaattaatcttttatttttcttggtaaaggaaccatgagtaatatcctatcattagcacttccatgattcttactttctctccattgtgtatttttttaattttaatcctaacagaatcctaagttttaaaataagagaaaagataaaaggcagtatttctaacgtactttgctgcctaaagatgaaaaatataactgtttggaatcttgcaaaaaatatatatcaatttgctttctgtaggttcattatatttatctatatatccatacttaaaaagaaaaggcattactcttaatttttattttcctgacttagactgttatggctccgcagacagcaggtaattcacgttagtgagtttttttatagaaataattgtttcttaattttatataaaaaactatatatttttgaataaattaaatcaaatatgtatatatatttttcaataataaataaaaacttacaatgtgccacaagaattattaagttggattcattgaacctttaaactttggattacagaaggaaggaagataatatgaccctttatagtttnnnnnnnnnnnnnnnnnnnntgtctatttttaaaataaaaaattgttctaatttttattcatttaaaattttaagacattattaagtattattttcaatatacccttattatattcatttaaatattaatattttatctacatattataaatgtgagagaaaataatataaatttgaatatcagcaaagaaacatgcatgtagcataatcattttgaaaaagtgaacatttggatcataatattatctaaatgccaacgcaacttaatctgagatgcaatgttttgtatcattattcaccatgaacatttcatagcaaaccattgtttttataaaaaaatagacannnnnnnnnnnnnnnnnnnnnnnnnnnnnnnnnnnnnnnnnnnnnnnnnnnnnnnnnnnnnnnnnnnnnnnnnnnnnnnnnnnnnnnnnnnnnnnnnnnnnnnnnnnnnnnnnnnnnnnnnnnnnnnnnnnnnnnnnnnnnnnnnnnnnnnnnnnnnnnnnnnnnnnnnnnnnnnnnnnnnnnnnnnnnnnnnnnnnnnnnnnnnnnnnnnnnnnnnnnnnnnnnnnnnnnnnnnnnnnnnnnnnnnnnnnnnnnnnnnnnnnnnnnnnnnnnnnnnnnnnnnnnnnnnnnnnnnnnnnnnnnnnnnnnnnnnnnnnnnnnnnnnnnnnnnnnnnnnnnnnnnnnnnnnnnnnnnnnnnnnnnnnnnnnnnnnnnnnnnnnnnnnnnnnnnnnnnnnnnnnnnnnnnnnnnnnnnnnnnnnnnnnnnnnnnnnnnnnnnnnnnnnnnnnnnnnnnnnnnnnnnnnnnnnnnnaaattaaaattgtatttacataagaggtatttgaaatgaataaaaaatagaatttaaattctatatattatcagtataaaaaaattgagaaatggtagtgaaatattagtgctctttaatatactctttctaatacacttcactatcattaaaatttattaaatcttacaaaatcaagagaatcattaaatgagaagtaaaatctataaaaaaatataattttcaacaaaattcagctaataaaaaaatatgttaaagagtatgttattaatatatataaaaaagttttattttgtaagttaattaaaaataagatacatataacttttaaatttaattattataaaaatcaaaaaatttagtgtatatttctatttgggattaatgacaatacaaaaggaatttacactatttgtatatgaactttttgctctagacaattataataaaaaactaaacaatcattcattgtagaagaagttacaccatgtgtgtgttgtgtgtgcgcaggtgcctgcgtataaagatcaaataacacaaggcattgaacttagtaaaatcaaaagtgaattttatcaatttaactacttccttcatcctaaaataatagtcatcttaaattgttttattcaaataaataataataataataaataaataaaagataataataatttattatttattccataaattggcatgggtttggtcttggtgtgagattggggtgtcagctgaaaacataattgggatgtgacaccttgccttgtgctcttatcattcttttaaaaagatagtaattttataaaattagtgttaaattatgattaatttatttatagattttgttatccaccattaatattataaagaatataagtaaaaaaataattaatgttacactgaaaaaactaatatgataattattttaaaacaaacatttttctcttttatgacaattataatggaacaaatgaaatattgaatttaaaattctcataaatatatcaaatatacaaaatttaattggtacttattgtcttattttagcatatgatatgttatttaagatataaataaaaacagttattgttgaattatatattaataaatgtctaaattataaatttttctatgtacaccatcatgattatatcacatgcatcaaacaattgagttgacaaaaaaatggttattgaatgtgtcattttactctatgtttaatacttgatggcattttatcttgtctcgtgcacgtgtgcttatatataatttaaaaatgactatttagattacttgttcgtgatacataggaagttttttaatcaagaatgttttattataattataacaaatgataaggtgaatgcaagtagctaatgaatttactgaataatagatatgggtagaaagatttaataaagcttttatcaggatcgtttaaacttcttaccgatgatgttaggatgttttagcaatgaatattgagtttcattgatcttgaaaataataaattatattatttatatttggtcttagaaaaggtattataaatttaaatattaaacttccgactaaattttaagaattatgttgcatatataactaatgagattaaggaatcataaaataaataacctcataatgactttttttcgccaaaatcaccactatatgagtgcataaaacccatcaaatatgaatctaacttcatttttacacttccttcatactctcacctatttgagtgtaagagtctttgcatgtgatcatcacgacattaccaaacttgtctttttgtcgtactttttgctgtaccatcttcaccaaccaaaaattgtctttagtctagttcatgccttcttgatattttaaattaaggaataaatgtaaaaatatttgtatatgggttcaaaagaacttgtataccaagaaaatattagtaaaaattatcttgagcattaaaagaagatgcttggattatgcgggagctaatcacacgaacaataggggaagtctatgctttaactatctttatcattatttgattttctagattaatttgaatttaaaatttccttattcctggtttttgggaaattttatttttcttttttactaaccatttaaaaaactagcatacactaattcttttagagtgccttcattaatttatttgatttagtaaaataatacatgacaattgacaaatctatgaaataatactctatttatcatttaattatttgttcaacttgatacattttcaaattttgatatgtaatttgtgattttttttttgttgtaattaaagtttaggtgaagtggatctgaagagtcttcagagaatcaggacagatatcaagaatctcatgtcgatatcaaaaatcaaactcacgtctttgtaaaatatatgtatgattttttatcatttggatcaattttaattggaccaatctttattgacatgatgtattattttctaactttattggttatcacttattaataattggaattcaatttattttttaaattgacataatggtttaatattgttttgattgcatttccatttctaccaccaaacacctgaattatcatcttttttagttgggacaatttttgtcccatttgggtgatcggacccttaaatgcttgctgattgttgtttataagagttaattttgatttaaaaagattaaggaatgaaatggtgtatgattattttgttggagtctgaattcacttcattctccagattagttctaaaaaaggttaaaatgatatcagttcagaaatacaaagcattgaaagaagtctctgtcgataacagatgtcctttcactcctttgctatgtttgtatagacatgatgtcggtatcattcaaatccatgatattcggtgcctaaaatctaaacaaaaaataaataaatagaattaaagaaagaaatagcaaatatccatcaagtttagtgtttattcactttattggttgggatatacactgatactgtggataaacacagataactgctggccatctttccctaaccaaagcaaaaagttattattggttctttgtccatagtccatacgtggatatttcgttatgatttgaaagattaagatggcatagcatgaacgttattttttatcactaaacctctttctattttgattacaaaacattttttattcatcacttagtaggtaaataagagattacacatataaaagtatagactttttttaaggatttttttatgctcatatatatctcaaaaatagactcataataaagttatgaaaaactaaacccctttcactggttaattagctaggaatgaaaatttgggaatatttaattacaataaggtttaatcattctaaagtttttttttaaaaaattttattttttcctatttatgttcacgaaccaaagatttagacattctaaccatcatccattcttatctcatctataataggatatgatactttatcataaaactagttaaattgaatgaatgacatatgtagcattccaattaaatttgtacgtaggccattaaacctttccaactcactcgtactattaggactccaattcaaagacacatcagagcgttatatatgttagaatatgatatttgtatcaatcaattaacttaaaacagtaattagcttaaaacaacgaaactcaattccacctgttctaatgtctaagatttcaatgtaatagtaatgtgttgtgcatttaatcttttattattgtcacccatcatctttttctactattcagtactttcaatgtaccatttttttatataaaaaaagtgaaagaagtaaattgcaattagattgctggtacccccttcccgcattaaaatccaaaggcggagttttttttggcaagttcaatcttttttgctaagtcggagtttgctaaaaggatgttattttcatgaatcatgatataacgtaaataaggttgtaatggttatcattgaaaatggaaaatagggtccatttttatgattaatatgtaagattaagcaaaatacttcaacattcgtttcattatgttttattaatttaaattttgttgggtgatgtctttttacccacgcaagccgtttagatgaggcctatacgggtcccaatctaattgatcaattagataacaaatgcaattcgtgagttcatttttagcttaagtctccaaatttgaaaaattcaataaaactttttactaggagctatttgccccataatttagactatttttcaacaataagtggaccaacataaccaatcttttgcgtatattattcttattcacatgtttttttttattaaaaaaaatcaaatttctggatcatgtcatgtgttcgaagtatgggactcattagcctcctgaattgcaaagttcatgaagaacaatgacattttttaagctctacttttgtttaacattctagatggttgataatcttttgatcagaataagggggaattgagattaagaaggagcaattatgagggcttccaacagaaaacaatgacattttccaatcccttcttttgtttcacattttcaaatggttatggttctttggtcagaaaagggggaagaaaatgggattgagaagagcaattaagagctcccaccagtgattaactttaaaaagtgagttttgctttgatgttccttccaagaaagatagtctaggtttgaatttaaaaccttttttttttcccgttttctttacttctttgcgcttttgcctaatcaacaatacatcataataaatggtcccatctttccaaccttcatttaattgtcacatactctagcacctttctcattaactttcaaattacacaaatacttataatgcaacccattagcacaaatattttatgggaaaacataaataaatttaatatttgccacagagcattctatcaattgaactttgataaataaattagtttattaatttattgtacacatcaaacaacactgatgataggaagaagggtccaactttttttaatttgacataaccataatttacattaaaattaaaatttgtatttttaaaatttaatatatctctccgccaagagcttgagagagatattaagatttatttaagatgttgatttcttttaacatatttttctttagatactagtctaagattgaatccctaatcacatttaaaagataagattatttctccatcatatcacattattttaattttgtatttttggatatttagatggatgtacattcaaatattatcatcaataggaacaaaagtgtgatcatatatatatttcctttgagctggcatatatgtactaaataaattttataatggcagcccaatttaggttaattaaattagcattggggggtgggggagggagaggtatctgctcaattataaccagtagggccaaatgagagacactgaaaaacttatggtgtagtgcagtggaaacttgaataaagcaaaagcaatttgttggagggccaaagcacaacattcaccaaggtagctatagattccttttataaaagagatatggaaatgtagatattattttggaaagtacatatgggtgtgtgataatgtatgggaacaaaattttgaattgtcatcaaattatattttataaaacatagggtgctattgctatggcaattagtcggtgagtgacggtgcagccatgaccccaaaagccaaattcatccctgttggaccccaaacatcggcttcttaaggctacctttctctagggtttaattggattacttaactagtgagttatttcattgttcatccaacatgaatttatggtaaagaggacaaaaatacaataaaactcaaataattgaataaattatttgatgcaagtttattttaacatagaaattcacgaattacaagtatagaaaaagacaaaaacaataattttattagaatgtcaatagtgtacaaaaattacaccattatctaattttgaattttaaaataattgaaattatatttatgttaatttttaatatgttgatgatgtaaaaaaaattatacaagtagtgtatcaaaattaaactaaaaaaaagttgtgtatatggttataaacctaaaataaggtaactcgtattcttgattgaggggggaaaacaacaaattttttataatattgtccatctgttgaagttaattatcagctttctcttaaaaggtgtcacccctgtgaaataaaattggcacacaacaggcttgtcgacaaagtaaaataagtgcaatttaacttttaagcagctatcttgcaaaccagagtttgattttatacatgatttcattggctggaatgagcgtatattaatattcatataaagaaaacaaagtttcttaggaagcatacccacataatgacttaagcatctgcaggtataacaggccccactcctcactttgggtctggtccaccagctcatgtgtgtggtttggtgggccgttccattttgttacctcaatagaaaaattgaagaggagctggcagcaggatcatcaaaataatatttttcagccacagaaaattctagaccttgaaaaagctcattacaaactcaaactatctagatcccaaaacactaatccacataaagcagtgattacacaaggacagtttcacattttctgtctgaaaaattcctcaagtttcacaacaatatttgtctttaggtacaaatgtaaaattaccaacatgatataatagtttgatagataatcatgttcctcaaacatttaaccatatgtttatatgtatgaaataatatacatgtcagaaaatattattttttaaaataattttagtatctcaaaattaatttttagcttttaattaattgatacagtaaaaccatttaactgttaaattgccatgcttcattttgtcaaaaagcattccataaataatgcttagaaaaaatatacacaaaattcttttattttctttgactcaagaacatttcatttcccccccttaccttagtcctctttggttatcattccattcaattcaaaccgcctatttctcactcagtctaaataaaaccacttgctatctacttctcttctactctctctctctctcatacattacacacccaaaatacagttttgacatcttgtctgaaaactctctttcccttaaacctttttctctgtctctcattccaatacttgcttaggttccaatctgatattccaggtaaacctttctttgtacatatcaaaaaaacagaacaccaaccatggcttccaacaagtttgcaaccatgttgcacagaaacaccaacaaactcaccctcgttctagtctatgccatcctagaatggattctgatcatcctcctgctcctcaattctctgttctcttatctaatcataaagtttgcggattactttggcctcaaaaggccttgcatatggtgcaccagaatcgatcacatcctagagcctgggaagtacaagagttcttgcaaagatcttgtgtgtgaagctcatgcctctgagatttccaaactggggttctgctccaatcatcacaaactggctgagtcacaagacatgtgtgagaattgctcatcctcgtcccaaccagattatgtcaaactctctcagagttttggtttctttccatggatgaagcagataggtatgattcaggatgagggtgctgaagatgctgttgacaaggcaattgtgaaggttgaagtggctttgaggtgttcttgctgtggtgtcaacttggacacaagattctaccctccttgcattctgatcaagccttctctcaatgttttggagtatgaccagaagcagaattcggagagcggggttggtgtagagattgatgaagatcacaccagatcggatattgtgcttgatcatcatcaggatgaaaaggagaatgaagaaaacaagggaagccagatggtgtttgaggttgatcggggtttggatggaaaagatgaggaggcagagaagagttgtgattgttctgtgtgtgatgctagcgtggagattctgtgtgatgaaatttgcaagatggatttgggtgtggagaaagggaaagaaacaattcaagaggaaagtttgaatgtccctaagcctaaggataatgatggtgatgatgttgttgctgctgctgatgatgatcaagcttgtgagaaatccactgctcaagttgattgcactagagagataactgtggagactccacccatacatctggaatttttcattcatggtgatgattgcagattgattcctattgaagtggttgactcccctgccccagaaaacaggaaacaaagcaaatataaggtgggacgtgaagggctcaacagcaatgaagattttattctggactttgataagagtgctgatgcagaagccgaaccggttgtggagaattggcacatttctggggatattgtggcagaattttcagcacaagggaatgaaaatgtttccaagtccaatgggggtgaatcagttcaattaaggaccagaggccagtcttcagagctgttacaagtagaagaagaaagtttggagcagaattgtgaagatgtgagatttgttcaaacctcggaagacttgaccaaggatgataatgttgaagtaaacatggaaagaagagatgcagaactatgttcagatgtttctctaggttctaattattttcctcctcaataagtctttttagttcttatacctttttcttctggattttctatgtgcaatgatctctaatactttcttaattcctgcagcatctgaagatgcatcacaaatggaaggtgaggaatatgaagcagaagtctcaatagggactgaaattcctgatcaggagcaagtggatgagtatcaaagccaagatgttcttttggatacaaatcaacaaatgcaagaagatccatctactagcacagtcagatttaatgtgcaagatgaaattggtaggcctcaactttttcttatcttcccttttcccaatgtccagccttaaaactttctaaataactcgcttctttttattggaatttataactaggtcatgacaaaggtgaagagtttatagaattcaaaaccatgtcacttgaagtgaaaatgccaacagtaaataaccatttgccatctttattggagcttaatgagaatgaggaagaaaaagttcctgacacacccacttctttggagagtctacatcagctacacaagaaactgcttctccttgagaggaaagaatcaggaacagaagagtcattggatggaagtgtgataagtgatatagaaggtggtgaggtaacaattgaaaagttaaaatcagcattgaaatctgaaaggaaagccttaagtactctatatgcagaactagaagaagagagaagtgcatctgctatagcagccaatcaaacaatggcaatgataaataggcttcaagaagagaaagcagcaatgcagatggaagccttgcagtatcaaagaatgatggaagaacaatcagagtatgaccaggaggctttgcaactcttgaacgagctcatgatgaagagggagaaagagaagctagagctagaaaaggagcttgaagtatatagaaagaaggttcatgaatatgaggtaagagaaaagatgatgatgtcaagaagagatggtagtatgagaagcagaacttcatctccctcttgtagcaatgctgaagatagtgatggattgtccattgacttgaatcacgaagcaaaggaggaaaatgggttttatagtcatcaagatcaagaatgcagcaaccagaacacccccgtggacgcggtcttatatttggaggaatcattggcaaactttgaggaagagaggttacaaattctagaacagctcaaggtattggaagaaaagctagttatattgaattacgaggaagatcactgctccgatgatgctaaatcagtagaacatctttgtgaagagaatgggaatggataccatcatgatcatgatgatcacaatggtcaggtaaatggatttgcaaatggtcatgtaaaggaaataaatggaaagcatcaagggaggaaaatcatgggtgcaaaaggcaagaggctcctcccattttttgatgcaatgagttcagaagcagaagatgttgagttgagtggagacgagttagactttccccacttgcaacacaattcagttgaaaaggttaattcggataggaaaaaacttgctttagaggatgaggtggataatgtttacgagagactacaggtgctggaggcagatagagagtttctaaagcattgtatcagctccttgagaaaaggagataaagggttacatcttctacaagaaattttacaacatcttcgtgatctgaggaatgtggaactccgggtcaggaacatgggagatcttgcagtataagaagtctccatgctcaaattttccaaagagatgatataggtaaaaaataatgctgatcttgctctattagaaattatttatatttctcaatcataatatcatttattgatgagtaatagtatgtgaaaccttcttatatgataagtctattaacttttacaatatatatcttaaaattcatatcaatgatgatttttaataaattaatactataaactattttttatagcgacgatgcatagaagctaaactcattatttatgcttataatgtagatttgtacattggagttgatctactagctgcaaatgaagcatgcatgcgtaccactgtggtctacatataatagagggcaacaaatgcatcacttcaattttaacaaaaaaaagtcagtgggagttccctgatggagaggggagaatccaatggtggacaagaaaactgaagtctgccattctcttttctttgtttcttttgtccaggtaagcccaaatttttggtgggttgtgcccatcatcaccttttgtgggaaagggaagatgatgagtatatgtgtgtgtaggctagtgaggtgaagccatcctgtccacttgtattttgtgagagcatcgacctggcttgcaaagctggacacatcccaaaaagattccagtgccaggtaaaatagcactagtttattagacagacagaattagggccactagttttgtcatttctttcattttttttcttttctttttttggttagagtgaagattgaggaaagtagcctctctcttttctctttctcttttttttcttttttctttttttcattcttgcgtcatcctttgaggtttgtttatttctgagggaaaaaaactgagtaacttgtatactacatgtattcatttgtaattatttataaaaaagtgagtgtttgtttatatatatactgctcggaatacatactgcttggaaataattaactttgcttcttgttatttttttaaagcttgtgactgagatagatgttttataaacaactaaaaatagtgaatggaatatttttatttgattgtttaaggcttacgctgctttcacattgaaatatttgattgcgctttaagcaaaatgcaacttcttgttagattagattgaaaacaatacaactatagtaaaataataatcttactaagttattatactgcgctgaaaacaatagaaggatggcacagagatacaagggacagaagcgtatttgtttattgataacaaatcaaagcaaatgctttaaaaagtgtgaacagcgacgcaacaattgccaccaaagcaagatatttcatcagtcatgtcacccttggatttattcatgaaaaaatggctcatgaaggattgaagatggcaatacgcaataaattgcctcagaaaaataggaaataaatttaatgtagtttgatattttttacataaatctatgaaactgtctcaacaaatattaatgcacgggacttacaaacattgaaaattccaataattcgtttctaatatatattttatttaaaatttataatttatatcccaacgcaatttttgtgtattgaagttgttcgatattctggttcaaaaattaaataaaaaataagtcctactatattatcattattttaacgtgaacaaaataaactaaaaaagtcttcaaaattaaatcatacaattgcaggggactcatgatttctttttcctcatagcgtgaaggcttactgtagttaattatgtttaattgtttatgtttatgtttagggatagggtagcatgtacagaggagaacttccagtgctggtgagtaggtagaaatttttgaggaaatattcctttcttttggtgatgatgatattggtagggataaattccttcgggtttcggcagttgttaaaattaagtttaagtatgttttacttttttttttttttnnnnnnnnnnnnnnnnnnnnnnnaataaataatttttttatatgtatgaattaggaattaaatctataattacacacttaaagagtaaagttattaatcaaatatatatcaattatgttatagcatgttgattaaacatattttacttattttcattatttatgtgtgtatgaaaataatttataatataatacatgattataatttgatcaattatttgaatttattgttaataatttttataaatatataagtattttaaaataatacaattatttattatgtgtttcttaatcaaaattaataaataattattataaaagtaaatagtacacatattaatagtaaaaagactttttatattgttattttaattagagattactagtttattacgtcttactcattgttcatttttacaattattcattaactattcactctcttactcttaaagagtcgactttaacatcaagaggaataaatgattcgaaccttaatcgtgaaattgtaaactgctagtagtagatctcgccttctgataaacaatttcactatttaattttaaaagggcaatttagacaattacaaattactctttaaaaaataaattcatttacaaatatttatatcaaaaccatgtaactagaaatctacacctttcaattttttaaagttatatttgacagtcataaaattgtatatcaccgtaacccagtggacatataagattgatctagattgaaaaaaaatgaaagaagaataaagaaattgtaggtttaaatctcctcaccagacacttctaataaaattttaaaactaatatttaccataaaaaaacactttaagtacgttcacactagcctaggtagttaatttgacatgtgacaaaaaaaaggaaaaaaaatattcttttattaaatagtaaatagattatacaaacccgaattagtgagggaaaaaaaattaaaatataataattttaataaaaaaattacgaaaatattatagtgtctaaactatttacaattgtatagcaatcaatcacatcctccttagtcttggtcaaattacgatttaatcttcgaaccttcaaaaacaaatttggtttctaattttttattttattcaattagtgaattgcatgctattttttatttttctaattacttctcttaatttcactccatcggacattccaatcaaaagctgcaattaattaaaaaagcaacaataacactaactgattataaatttaatccttgtacttgaaatcattttttttaacagtcccgtccattataagaagtatcattgtgttaaattaacttgacactcattttcgtttaaaatgaaatttgttatttaggcctttatgcaaaagatactctaactccgcaattaattcatgatttttcttaaaaaatattagggtttttttacccaaaaaataacattgtcataatcattgggtttaatagaaaaaatataacaatttaaactaacaataacatgaaataatggtttaatagaaacattgatgattaagtctaataattatctaagtgaccatacttgcaaacatgtagaaaccacatcatgtatcttgttagactgaaacaactctcatttcaaatttgaggttgtgttaagaaacttccaagctatgtggggctcagtgaagttcacaaaagcgtaacccttgttcatcctagttctgcaaagcatgaaattaatcatcaataagcagtttccacacatatcacggaaaaagagagtgagagagagaaaggttagttaaacataaggaatttgaaattaagaaaagtaattaaaaaataaaaaatatcatgcaatgcactaattgaataaataaaaaattagaaaccaagaaattttttgaaggctcgaagattaaattgtaattttgaggtacttagagacatcttttgggaaaaaaatttgaccaagtccccttacagacttgcttagagcttctcctctcaatttcgagcgtgtggccactagtttcacctcaatcggacactacagtcaaaagttatgacctttcgaagtttatgtacatcgctccgcaaaatgacacgcgtctcaaaatgacacgtgtcaacacatggtgagtcacgtttggggaggatgtgattgaacaccagtcacacccaggaaggacatgattaaacacatttagggagaacgtgattgattactatacaattgtaaatagtttgaaattataatattttcttaatttttattaaaattactatattttattttttttgccaattacaaagtcatggtgtaccttaattagaaaggactagactacatacgaccatatattttgatattcttattactgtatggtatatttgaaaggaaaaaatatgaatgatgaaacatatggtcgtcattttctgtaattttaagagagacaaaaataataattctataattttaatttgatatatatatatatatatatatatatattattttaatctctctaaaattaacgagttttaatttttttagtgtcccttatacctcaaatgattgctaatgttattattgctgcaaagtcagtagcattcttctttgttttgctttttaaacataagctaagtttgataaaattagctaaaagttgaaaattgtaaagtatatttgataaaattatttgttgaattaactgaaaattgtaaaataataaaattgtaaaaagagtaattaagaaattgaataaatatattaaagataaaaataaaaaaagaatataaaaattaaaaatataaaactaacactttaaaaaaattctatttcaagtaatatattattaattagatttttgtatctaaattatttaataataaagcatcgatactaaatatagtggcaaagatgatgaagttaaaacacatatatgttgccattaaagcatctttaatgttacatcatnnnnnnnnnnnnnnnnnnnnnnnnnnnnnnnnnnnnnnnnnnnnnnnnctctctccctaagatttcaatttgagatctagcattaaagaaaaaaattagaaagatcttgagagatctttaatcctatgtggtactatagggtccacaaaaaagtggtgtaagatctcaatttaagatttatcattaaagatattcttagaatatcaactttttaaaatataaattatttttaacataaaattagaggcattcaataaagacaaaagatatttttaccattgaaatataaacagatcaatttgcaaatagaaagagaggaaacttaaaaagaaaattgataaagcaatatttatattattaaatgatttcttgatctctcatatacttcacaataattattattatgatatgcctaattaacaagacacattgtatataagataaaattctgataaccacacaatcataaatttattgggtgaaaataagaaaataattatttatttattcctccaatcaaaattaaagaagatttttttggtaaattccaatttgtgacaacaattatgttgtcctttaatgccgagctcatgaaccatttgggtacataaatcaaatgaaactagttcatcatctttttttttatggagaatatgtagtttttctttcccactccaataggacaataaatgcgaggttagggtccaacaataaaaagtgcagtccatgattccttcacaccaaattcactcaaaactgatatgcgaaaaataggtgtctccacataatatgatattaaagcaatagagtcatttaacactgccaagtacctgcccgttctataatcaagagtgtcatttggtgaattaatgagtactataatatcatccatgtcagagggcatagatgttgtagagaacacctcattgcttaatagattcaaatgacaccaaaaatttcccggttgcactttcaccctgccaatgacacattccatccatatacacttgggaaccttccattttatggtaacaattaggcatgtcaacatcaaaagtgtcctccaaaagttacttcttaaactttatatttcccacagtgggtcaagagatatatcttctcatgacacatcttcccacgacacaccaagatcatcaagacaagatcgtttagtgcaaaaaatgttacatgtcgaatcaccttaactataatcataacaaaatccttaaagtttgaccacagggtttcagtaaggtggtatagattcaacaaggcctggcaggaatataatgacattgaattcctcagtgattaggttccacaatacaattgttgtccctcgcatgagaaaaacagttccattaatattgtcagaactcatcattcgaacataactgggattctctcaaaatgggggtggtcaatctaacttgactctcttcttaaatctctcaccagaaaacaaatacttgaagaatctaattcacccatcgtagaaaatggtgcaagttgttgtaggatgacaaatgtatcatcataatattaataattattagataaaaatttgttgtgatacatggccatgaaaggagagttttcaaacaaaaggccccataatttgcgtgcatatccaaatctcttcaaagattttagaggcagttttgacaaaacaatgacaatatcatcaggtatgttttttttacttatctttgcctccttatttgttacaaccattgccatagatttatccttcatagaaggacttttgacaataaaattgaaaaaatgagattgagaaaattggcgaagccaaatccactcaagtgtagctgcaagtgtaaaaaatagtctcacctattggatttatatatatttttattataaattatatcttgacttgacttgactgaaaagtaattgtcaaattttgtatataaataaattaagatcatgtatgaagatattttgtaatatttttaattttttatttaaagacttcttcaatcttgtcaacttgcatttagattctacatattctcgtgtatcattatagtattttgttaattattattttattttttattttacttttaataacttgtcactacaaactatgtctggtcaatataatatttaatgttatgggtggtcaatttttcttataatttattagttatgatatttcttaaatataatatattcattaaatgtaaaatatttttaaaagaattagttgataaaatatattttaaaaatttatgtatctattaatgcaatattaaaaaactgataaatatataatattttctcatttttatcattaataatttgactacatattgtatttaatatatatcatttaatattattgggtagtcaattttacttatactatattattttagatatttattaaatataatatattctatgaattttattagtgtaatatatgttttgtaaacctattactttttggacagtcaattttacttataatatattaatttatgtatttattaaatataatatatttcttgaatttaacaaatgtaatacttgttttgtacatctatgactttttggacagtcagttttacttctaattagtaccttaatttagatatttattaaatataacatacttcttgaatttaataaatgtaatacatgttttgtaaacctatgactttccatatgaattnnnnnnnnnnnnnnnnnnnnnnnnnnnnnnnnnnnnnnnnnnnnnnnnnnnnnnnnnnnnnnnnnnnnnnnnnnnnnnnnnnnnnnnnnnnnnnnnnttattgcaaagtgacatgtaatatctatctatatacatacatacacagacattaaattttaataatttttattattttataaataaatcttttaacatatttgaaaaaataatatttcacttgtctgttaatataagttaaatatattaataaacataaattatagtgtaaaaagtaattttgtgacatgttttttttttctttagttaaaactagacctcgaaccggtacacgggtgaattttgcgtgtgatgtaatattttatattgttttaaaagataattgttaataataaaataaataattagattctaaaattattcatgtgcagtatattatccagaatgtgagtttggatcatccctacaggactttagtttggtcaataaggctgttattggaaaggattgggttgtgtaagttcatgtttatcgttagacaaactctgttgtaaagtaatatacttttatcgagaatctctctctcaatttaatagctaaaaataattttacatcacaatttaaattatttaatattataaatctaaaatataatttataatactcaaatttatttatttattatggattttaattataactagtatgttttttgggtggtaatatctccattttaaactttattatcaaaaaagattattaataaaaataaaataaaaaattaatgatattaatcaacatattttttttaaaagaatcaaaataacttataaactaatcgattgcatgaattattataaattattttatattctttgattcctatgaataaaatatactaatttatatgctattaaaatattttatcaaccacactcaataaacaaaagtttatacaaaatttcacataacacgcccagaaagcatgcatccattcatacaagtgcaacaagctagtcaacctataaaggaaggtttcatatctaaataaaggaggtgacactccttgctttgaaaagatcatatgaaaaaaaaaacgtaagaaaattgtgttgtcgatctttgattctgggcagagtaaacaaactctaaatatctgttttcttagggttaacatatctctatattaatacattcatagaatacaatttcaaaatagagagtgtgacacaataaatttgatcaaatgaatgtaatttataatgctgaattttgcttgatttattgcttatttacaaacatcttgttaacactggataaccgtaggttattataatctagcaatctttcattttgtctttgtaatgattttgagcatccatctgtgttctctttagttagtaatatattgcttttgctgattaaaaaaaatgttgaatattgttctttataaggctaagttacaaaactacttaaaaaacacatggtaattttatcactaaacagttaatatgttcgtgatgggaatgcattcaaaacatgggagctattaccttacctatgactcgtgagttggatgttgaaacttgattggaatgatcatgacaatgtggtctcttttccgtacaacgtcgtaatatcataaagaattccgtgtgaaatggttacaaaagcagtgacgatatggatccgttctctcttgacttgtaaggcagaggaaacgatgagggtcccgaaacaacggaatcgaccgcgtttggttgaagatgctttctaagaaatagaataatcgtttattttttcttcttctaaactcttctgagattttgttttgtttcaacaaaatagtaatgaaggataccaaacatgtcgtgacattcgtcagagaaggaaatttttctatgtttcaatttttggattgatgtgcacatttttcattcaaacacttatgagattttgttttgtttcaacaaaatagtaatccagctgtctttgatgtgtttacaattttaactttaattatatttgagcctcaaagaaattaattaaaaattataataaatttcattataaaattatcaactcaaaataaaaaggtattaggaaataaaacaaacagaagggtctgaatatttgtacttttaaaatacaagtatatcttaataaaatacaaggaaacctgatatttttattgagtttaatttttagatattgtcaattatatagtgttaactattttacgatactataattaaataatgtttcagatgtgttttcaattaaatatattttactataaaatcttgtttgcattatttggtacgttctgtgtttgaagcatttaaatgtaaatccaaacatagcaatcatataatgtttcttataacgtaggcttagatttaacaaaatacctttttaaaaaatattttctcacctaataagtgagaacttgatccttcgagatatattcaagcacggtggagatattaaagcagaaatttatcctaacaattatatttttatatacataactttttttgttaaatgttaatcacatgctgaaaagatttgagtagcaattggaatattttgagagaccgcaacttactttgcctagtttaatttaatggtaaacgtgaccaaacatatccatgagttcaaacgtttagcaccattaatacttaagctcaaaggctactaaggaataacatttggtcttagttatctttgaatggacaaaggaatcaatcaatcaaggttcagtcaaggtatatactgcgaatggattaaaaaaaaaaagtatatactgcgacctcaaatattacctaaatgcaatggctagcacagtgacaaaatagatttaattttagaaaaattatggctttaaataattttttgtattaatggttttgtaataaattaatattttcaatatttatttttttgaaaaaagaagctacaagtctataactataactgtatttcattttgagtattttgtgatcaaatcgaataatttataaaactgtatgtatgtataatgtttttcttgtcattatgatgtgaagtgtctattactttaattgataattaatatttgcttgataatattgtgattatctttagtgagtttttctttcattcatttttttcatcaataaaatttgaatgagattttaagaaatttgaatataacttagcttgtgatgtgttggtatctatgatataagtagtttaatttttttttagttttgatgttatattagtgtaaatatttaatatattaaaaattattttaaatataacttaaaagaattttatataaaacttaacaataataatttttaatttataccatcatacacagtataaaaaaactattcgtattttcaatacattctaattaaacttataaaaaaataggaacatgcatgatattattaagttaaaaaacacagtataataaatgaagttatataaaagtaacaatacataagcaaacaatagaaattttaattacttacacaaagctttcattaacatttgcttttacttttgaggcatatttgaaaatgatcattttctttaaattctctcaatcaaaacannnnnnnnnnnnnnnnnnnnnnnnnnnnnnnnnnnnnnnnnnnnnnnnnnnnnnnnnnnnnnnnnnnnnnnnnnnnnnnnnnnnnnnnnnnnnnnnnnnnnnnnnnnnnnnnnnnnnnnnnnnnnnnnnnnnnnnnnnnnnnnnnnnnnnnnnnncgttgatatggcagagagagaaagagtagtttgctagagagagtagcaaactacttataataaataattactccactttccaataaataattgtctccactttcctgtaatatatgtcattcctttattttttcatatctttttaaactaaattgaatggtaacctacatatttttattcaaatttttattcaaaataattttaaaagaaactgtattgttttacaaaactaatttagttaatagaattaattttcaattaaataaaaaaatatgataaaaaaatcaaaacttttcaaattgtttcacttattttttttttcaaataattgttaatttaaaatttgaatatcttgaatcagttttaaatttataataaaaattagaatcattttaaatagattttctaattattttttatttttaaatatattttttatttagttgaaaattatttttattaactaaattagttttgtaaaccaatataatttttttaaaaatcattttgaataaaactggtattttgaatcagttttaaattgattataaaaattaaatcntttatttagttgaaaattaattttattaactaaattagttttataaacaatacagtttttttaaattattttgaataaaaatttgtcccttaccatccaatttagttgaaaaatttgcaaaagtaaagagataaaatatgagaaaaaggaagcagttatttattataataaatatataattcaagtaaatttgttgctgtgtagttggttgaaagatctaaatgaaatatgatgcgtgacactgataatatacacaaaatagtaaattatgtactgtatagtttattgggagatttaacaaaatatgatgtgtgagagtgtgataatatgttttgatagtagatttcagtaatttgtgtttttggtggggtcattgtctcgagaaaagtcaagctggcgtcactaggtcaacaagcgcaacacgcaacactcttgtctcttcccattgtttatgtatttattgttctccccgaaccaacaaaatctctatgttgttctcttactcgcgcacacctctcatttccccacgaacccatttttcatttttccaaaaagatctcaactttgcttcaaactagaacactccctcttttatgttcccgtttcatgggcatctctcggaatcgtgaaccatagacatcgccatggacaaggacaaggacaagtctcacactcacagctttcttcacagtatcgtcagacacttcaaattcggttcaccaaaaggtaatttccctttctttcttcttcaatatgtgctttaattttgtggtagatgagttttctgattatactaggattctgtttctgctctgttgtgtttgatcagagcaaaacaatgaagctgacatacaacaaatggctgcacaggagcagaagatctttgcctacgaaaccttggcagctgctactaagaattttagtgctattcataagcttggtgagggaggttttggaccagtctacaaggtaaattcaaaattaatcaccaattttcttatttgttccgtcttaggttgctagcaagagtggcataacaaaaaactgataaagcttttcaattggttgaagtacagttttctctgaaaaggaatcaaataatggctggattcaataacttgattggtttgcaagcatttggttttccccctcttgtggtgaattcctctaaaatgaatgttttttctattattctattttactgggtaaaatgagaacccatgactcattctaattagtggaatttttggggtttccttgcaggggaagctgaatgatgggagagagattgctgtgaagaagttatcacacacttcaaaccaagggaagaaggagttcatgaatgaggccaagttgttggctcgtgtactgatgaaatgaatcctatttttttaaaaaagttccatataattagggttgtgtacaaaccatgctttttgtctgtgtagcactaagtttagatgaaagatttagtgtgctggtatttgaattggtgatcattatttcacgcaaatgaaatggattttaattaacagtctcaatcaagataattaactatagagtctatattatttaccatgaaagatgtgaattgagtttttccttcaacccaatttcatttggtctagctgactgcggaacatggactttccgggcgtaccttttcaatgtgattaatgatcaaacaattttttttttccaccatcagaatcagtttttatttgcattattataactatgtgccgttcaattttaacttcacctttaccaacaccatggaccgccacctatccttctctacctttcttcaaataagatatatatagtatactaaaacccatggtggacctgagactatgaaagagacttcacttgagaccttgacttttatgcacataaaattattcatttatctaattcatcggatatcttgcgtagacaatagaatgttcacgacggaactcctcccattcatcttatcaaagccatgacatgcgacttttgttgaataaaccatccctcccattttctcttttccttgccaaacaagcacatgggttaattaataaaaggtagcatttgggagttagaagacgaactttcaagtttcgatcacactcccactttctaagaaagatagtggaaacttcctaaacctaaactcttcttttctagatatattaatattagttgtcgtggaatagtcactaatccctctaaatcagatcaagttaatattaatttaggaatcatggttacgtgaggcacttttatttttattttttaaccaactaagctgatgaatttcctcaatatttctatttttatggttaaaaaaacaaatattatactaaaataattgccaattaaatttatgattaacatttgttcttgctgttgttagagattaattaatttttttgaataacagtaagttgaaatggatgatgcagaatcacaaaagagagagcagcttgattggaaacgtagggttggaataatcacaggcgtggcaaaggggttgctttatcttcatgaagactcgcacaattgcatcatccatcgcgatataaaggcgagtaacatcttgcttgatgacaaatggacgcccaagattgcagattttggcatggctcggctcttcccggaagatcaaacccatgtcaatacacgtgtggctggaaccaagtaagcctatgtttatattcttcttttttctcaaaaagttttcaatgaaattttgaatatacttacgcataaataattgcatgttgatccagaaaataaaacaaagcaaaataaaatagttctttattcgcgtacacactaagagtattattcttgttaatcattttcatgttttattttggataacaaaatcatttttccttaattttggtgacaagtgtatacttattaaggattacttagagtgtgagttcattagcaatatatattcgataatgtaaaattgaattttgttttggaataaatatatctctcttccatgtatcaagctttattcttgtaaatttacacattaatttacaatattttataagcaatattttatgtaaagttataaaatttcatgtaattttaaaaataatcaacattttattttatcgtaatataactatcatattatttgtctacaaatattttattgtatattaatatttaatatttaatatttaatatttaatatttaatatacattatcattaagaaagtttgatcggcataattgcataaaaattatattgccaaccctcttttatatatcaccatatggtttttgtttttactataataaatgtttcttaaataaaaggcttttttatttttatccttttaggcttttagcatcaacacatggcacatcatatatcaaatcaccaaattaaaaacttacgtgttagttacgactcatcttgcatctatatgattagtcaaatgttttgactagttaatactaatattcttttggttctcataaaaaagtaatactaatacttgggaattatacagtgggtatatggctccggaatacgtgatgcatggaaatctatcggtgaaggcagatgtatttagctatggagttttggtattggagttgatcaccggccaacgaaactcatcttttaatttggacgtggacgtggacgcgcagaatctgcttgatagggtaagagccattattgttatttttttgacttccttaactttattctgatacgagggtttaggtatagttgtttctttatcacccaaatatttatcgtattcttttacaaataaatgcgtctcattgacattccataagttttgaggactttttatttgatcaattgattaattagtagcaacttgtcattggacattgattgataacccttttcagtcttcacaaaaacaactctaataacctctacacccccaacctaacttcaccattacggcattacctcatacctacataatcaaactgcgtctagaattcccattaagaactcaaccttttgccttttggccccaaattataaaaaaataccgagcacaatttgatttttgccttaccgtattttgttttatcggcaaatgttagtttttttagacaaaaaggatcaaatccgtgacccttttcatttttcctttttctttaaccatatctcctgccttaccgtgttgatgttggttataggcatacaagatgtttaagaaagggaagagcttagaacttgtggattctgcattagcatctacgatggtagctgaagaagtagcaatgtgcgttcggctgggtttgttatgcactcaaggcgatcctcagctacgccctacgatgaggcgcgtggtggtgatgctgtcgaggaagccagggaacatggaagaacctacaagaccaggaataccaggttcaagatacagaagacctcggagacactccgcattgtcttccacattgggtacctctggtgcctttgattcacacgcttcagattctagtaataatgataatacaacggttactactagtgccacagggactagctcagctactgcagaaacagaccccaaagggaaacgtccaatgcgggagggttagctagcttagtctaagttcatcatatggtgttttttgcaatgaaagtatatatgtagcggtgtgaactaaatagaatgtaaatagattgaggctaggaatggcgatcgaggctcaagtgaattcttattctttaattaatattttacaagtgagaaattaatggtcacaaattatgtaatctctcattttccgatatgagtggatcaaacctgtaactttcgctttgacatggttggagatctaaccaattgaactacaatcccataaaaaatggtgcacagtttatatattgttacggtttctttcaaaccctttttttatatttattttggatttgaaccatttttgctgtaaatgaaagaggtctaaaatcaattatttcatacgggtagtggaagcagagtggcagtagcagtagtgtagatttgcttgaaatcgttgaagtattgggcttttgccagtgatatccaaaccttttcattggagggaaaatagatattataccaatatgatttaacataattgataaataattgggtttattaaacatgttcatgaagtttatggaaaaaactttattagaaagagataaaacgaaaatcaatgattagtctaatgacttttgattataaaatccatgacgatacttgctttcggggaaacaatattttttttttcctttctaaagaataaattaatactaaaataatgctaaagaaaatggtaaaaacatacattttagaaattttcttttaaaaaaaattttgcccgtaagttctttaagtgaaaaaaaaaagtagtaataaaaggtaaatagaataaactttcagctcaacaagaataaaataaaatagagaagtaaacagaaaaggggttaagcgaggaagactgtgtagaaactagaaaccctagagggagaaagagagagagagcaatgagaagaagtcttctgagaaatgctactctctacactcgcaaccttcttcataactccgcccctgtactcgccgcttcaactcgtccccaactcagactcttctgctccaatgaaacccccccaccggttccccaaatcgacgacgttaacaacaaaggtatatcaatctatctctttcttctcattctaacgacgtcgttttacaccttccattcaccattaccgttcaatttcccttggcagagctgaaagcgcagatcgagaggtacttcaagggcgacgagcaggtgctcccgtcgatcatggaggcgcttctgaagcggaagctgtcgggaaagcacgaggacaccgacgacgagctcatggaggagctccgcatgcgcccccttgacaacgttgacgaccgggacttcgaggacgacttcgaggactttcacgataccgacgaggagatcgacgatttgtacaacgccagggacgtggtgatgaagaggatggtgaaggacgagtacttcaacatggatgataaaaagtgggatgacattgttgaggacgggatcaagcacgggcttcttagggacaccaaggagtgcgaggagattctcgaggatatgctcagctgggacaaactcctccctggtacaccattctatatttttattacaaattaataccaaaactacactcattgattaggatatgcatctaagtttttgtctaaattgaagttggggaaaacttgatttttaattccattgcttgttgacatgtgataggattgggcctaggaaggcccaaataggtgacatttatagactagataatctagatatgatccttttagttttattttattttactagaaatattagatgatgccatttgtatggttgatatttcttgtaaaccccctgtttaacataggggatgtgctatgtaatagatcatcaatgaaagtatgagttattattttatcttctctcttagttttggtagaatgataggagtagtgatagaatagttatcttgtgcctatcaacatttcaaagttatttcactattactgataatcatgttgtgtagggaatggtaattaaaggttagaggagaatgtagggactagagtgtgtactattactatgtaagtatctttaattctgattactcgtgaagagtttttttttttttttttaaaataattnnnnnnnnnnnnnnttctaggctaatcagttctgttttaatgggttttatagacaacacgagatctttttgggttgtgcttgacatttattgcatactccagctgaaatttcatgatttgcattttagtgtagttgtcaattgcagctttagaagtggtttaagtgatgttgtgctaatttgctgatttggttatgtcttatgatagacgagataaaacagaaggtggaagtaaaatttaatgagctaggggacatgtgtgaaagaggtgaacttgaacctgaagaagcttatgaagagtttaagaagtttgaggatgagattgtggcagaatacttggacaaaatggaaaaggaggaggctccacagtttgatgatactactgtgccagataagaaaaaggacttggatgatccaccgggtgaaggtccaattctgcgctggcaaacccgggtagtctttgctcctggtggtgatgcttggcatccgaagaacaggaaagtgaaactgtctgttactgtgaaggagctagggctttcaaaataccaatttctccgtctcagagaattggttggaaaacgttatcatccagggagagacgagcttacaataactagtgagaggtaatgttctatcttcataaacattcattcatgtattattcaatcttatagcacctggatatgggcttttactggaagcagctacatttgtgtttgaaatgttcttttccatattttgaaggtttgaacatcgagaagaaaacagaaaggactgcttaaggacccttctctctctcattgaggaggcagggaaagctaataaactagtagatgatgctcgatcttcatacgtaaaagagaggcttcgtgccaatccagctttcatggaaaggctgcatgccaagtcaatgaggttgcaagaatctaatcaggttcctgcttgaggttttcggatctgatgtttgaatttttgaacattcacctgccataattttttattgctccctgcttttttgtatctgagtcttatcatgggtcccagttgcagaaacaacctccctgcttagagggtaaggccgcagacatctgatccttcctagaccccacaactgcaggggagactcatgcaccggggtacctcttagtcatatctttcgtatttagtgcttgaataatggataatttttttttacctcttgttagatattgtatgctagttgactcaaatgttacatttttgtggagtaacattgatcatagaaaaggctggatgacctccaactgaagcaagggatttcaatattttatattataaccacagtttaccaatcaattctatcgtgcttttccacaaaaaagagagaatagccacctcactctgtaacatgcagaattatgagtaatatgattaataaacaatctctatttctctgctactccagcccatacattgtctaagtaatcaataacatgtcatccgtcttaaatttagggtgcttatttcattttaaaaacatacttatactgttgggacataaagctagaggaaaagtagttagggatagttagagagggaagggtcagttagttaagaggagtgctatccttcggaaggaatagccgaaaattcctcaaacaaattttttagtcccacctgtcaattcaaaatagttataaaatactcccttgggtctcaattataagaacaaaaaacttatttacattaaaaaagttaatcatatgtaattgtattaatctcaattagaaactaaattttttctcaacttatctttcattagaacttgattttaggaataaaagagtcattggaactaaaatttcaattaagtgatagatattttaatgatagtagcataaatgaaatgaaataaaattagttgaaattttcttatatttgaaataaagaaaaatgtgtttttttcttatatatgatattagagggagtattagttaattttaattttccaaagtttttcctttttttccaaactctgcagtccgttatctcagttgaattaaatcccgattcccaaatgcattccctcattttcagagtgaatttactttccagcgactccataaaaaatcttctcctaaccatttttcctcaccattgttccaattagttcaactccactctttaccaacggaattctgtgcacctttaaaataattcagtttggtttgtacaaactgttttgcagttcaattcaagtgaaccacatttgcagttggaacaattcacgacaatttagttcagttcgaacaaccacaacttgattacttgaagctattagcaatcaccatcactatcttcactggtgtacttcatgatacaagaaaataagatctggtaggttgcaagctaaaggactatggcacatgtttctataaaaaattgggcagtaagttgacaaaaatacgaaaatagcaaaaataaggtcacatatgcaatgttacattgacaacatacagggagcagtagccacatagataagttttaaaaaattccgatatattgttgtccaaaataaatcattagtacatcaaaaatcaaaattcaaaaccgaatgattatatacaacgaccaataattttaaaaaaataaattgaagtgtgcttggtaagggtgaaaaatgaaggaatgaagaggaagtgaccatttgacttgacattagacaaagcacacatctagatatatcacatctgcactcctttagttccattctatttatccaattttcacttctaccaaggaatcctatgaaaatattgatcataagcactacatcaaacataatataaggactctcaaatactgtgttcaattgccctataccccacaaacattttattcactcttccagcagatagcccgatttttgttttcttcaacccaatcatatccaaatacaaatcaaaacaagagattctgcacaactgcggcataccaattgcagaaacactcttttgtgactctccaaccactaaacacttcagtcatcaattaatgattagtgctactgaatactttcgactgaagctgtcaaaatccaatgcgtggatggttgtattaactttaattatagggccattatggacttggggaggctacaactgattcagtactttcattataaagcaataactattcactttattggccaatgcgtggatggttgtattacctttctagataaagatgaatgaaggttgggttgaaggtagtagtactattagagtaaagaaattatataaagggagtattaattaaaagtaaaaggaaattacatactactattatcttgaggtttatttgtgactttaaacttatttaaaaattaccctccactccatttatatcaacttaataataattttttaacatatgctaataaaatcctctatttaaccaaggttaataaattaattagcattcaaaaaagtgttaaatgttttacaccacatattttttaaaacttattaaaattttctaaaacaaataagctgatgataattttcaatttcccccctcgtattaatattttaaaagcttaaattatgtaatatataaaacaattaagcaataacctcatttcttagttaaaaaaactaaattaaaccatataatccactataataccgggtacaaatttaactactcatgtctaaaagaaaaaaaaaataaaaggagcaaaactaagattcaaatgtcatatttatacaggaaacaaaaagctaagtataagaactcaaaactttattttacaaaattgattttgaatgaaattaattttaaaataaaataacttatattgtgatgttttattttttaagtatgctaatagtaaaactttacatgaaatttttaatccaatacagaaattacctaaatttatttcaatttgaaattaattttttactcaaaattaattcctcaatatatggaagactaacacgtaaatgtttacttaaaatattattttatcgtgattttagaagatgaaacgtgaatcgctacatctactgaacaaggaagataatgtcaaaattacgaagaagtgtgctatgctttagggacaatggctcactgtgtccttttggcattgcaaagagccacaactgtggaagtattaatattataattcatttctattaactgcttaatcaaaagtcattgtcatcaatgctggcgaacgagaatcgttgctgtgttggtgtggggttattaattaaacaattataatgatggcctatctagacaaaaataatatacttaaaagttggtgtatttaaatacaatacatgtaacttttaatttttaattattaattagtattcttatgcattgattattaaggaactatttttttttaaatcatagaatgtcataaaaaaaagtcaatgaataaaataattttacattttttaatattttttctctttttacttatattttttttatttttaattaattatttgagcttagttaaagtgatacgtgtaacgactacatatttaatatctagaattagtctagtcatctagcattaagtggacaaattctaggttggtaagactataataacgagtctctcaaaaaagactatagtaatgaagaaacccataantatatatatatatatatatataaacttaacataatcaggctgtatctaattcattttacatttttaaacataatactttttttggatagaaaacagaataattttaaaaattagacttgacgnnnnnnnnnnnnnnnnnnnnnnnnnnnnnnnnnnnnnnnnnnnnnnnnnnnnnnnnnnnnnnnnnnnnnnnnnnnnnnnnnnnnnnnnnnnnnnnnnnnnnnnnnnnnnnnnnnnnnnnnnnnnnnnnnnnnnnnnnnnnnnnnnnnnnnnnnnnnnnnnnnnnnnnnnnnnnnnnnnnnnnnnnnnnnnnnnnnnnnnnnnnnnnnnnnnnnnnnnnnnnnnnnnnnnnnnnnnnnnnnnnnnnnnnnnnnnnnnnnnnnnnnnnnnnnnnnnnnnnnnnnnnnnnnnnnnnnnnnnnnnnnnnnnnnnnnnnnnnnnnnnnnnnnnnnnnnnnnnnnnnnnnnnnnnnnnnnnnnnnnnnnnnnnnnnnnnnnnnnnnnnnnnnnnnnnnnnnnnnnnnnnnnnnnnnnnnnnnnnnnnnnnnnnnnnnnnnnnnnnnnnnnnnnnnnnnnnnnnnnnnnnnnnnnnnnnnnnnnnnnnnnnnnnnnnnnnnnnnnnnnnnnnnnnnnnnnnnnnnnnnnnnnnnnnnnnnnnnnnnnnnnnnnnnnnnnnnnnnnnnnnnnnnnnnnnnnnnnnnnnnnnnnnnnnnnnnnnnnnnnnnnnnnnnnnnnnnnnnnnnnnnnnnnnnnnnnnnnnnnnnnnnnaatgtacttatatttagtaattaaaagtaacatttccctaaagtacataaactttttcacgtggccacttcccttaaatttgtttccgtttaatatgaaagaataaaatacactgtggtgtcagattttttgtcttctattcatagtagtacctactacattatctaaaatcttataatataaatgatagtgcaatacgttgaatgaggatcttaaatttaaaatttaatctttattatatctcttaataaagagttgaagagatttttaacataaaagatgagttattataaaaaaaaattttaagatatacatattatttaaaaaataataaattttctttttatttctttgtccataagatctcaaaataagatctaccattaaagaaaaaaattgaaagagatcttaacagatctttaatcctatgtgacggtctactaaaaagtaatctaagatttcaatttaacaccattaaagatattctaagtacctaaatgattcctaagagttgaatttctaaattaattctgtttacgtcattattttaatttgataaaactaaacatggtacaataattttttatactttaaagcacaaattattagaaaaacaatcttaaaaacaatgagcataaagaattggtgatgttaggaagaaacgacaacaacatagcaggtaagaatcaccttggttagaattaattattgaaattctcagcattagcatcaaagaattataaattgcagctaacattaacatagacttgttcagaacaacccaatcatatgctgccagtcttaggatccaacatgtctcaaacactaagctgcagaacactacacccattggactcaactttgatgaagtcaatgtcccacaatccaaaaaagtccaattccaccgcattcacaaggcactttgccaaaaaatctgttgttttggtcaagatcatggcttctgctacacctacagcaactcctatcacctttggattcaagaatttgttggatacattcactgttgatgtgcatagagcagagaacaggccactgaatgtgcccctaatagccccttttaccattgctacctctagattggacaaggtggagaacgtggccataagggttgagttgagcaatggtgctgtggggtggggtgaggcaccaattttgccgtttgttactgcagaggaccaaaccatagccatggccaaggcttctgaggcatgtgccttcttgaggagatgtcctgcactcactttgggttccatgttgggggagattgctggtattcttccagggcatcaatttgcttcagtgagtgagatttttattttttttagttcatgttttaccagtgcatgtgttgttgttaatcattctaatcctctaatgcttctcttcaacttttgaacctgacatgttcattttagttcatgttttactagtacttgtgttgttgttaatcattctaatcctctaatgcttctcctacttcttgtgcttttgaaactgacatggtctttttgaccctgttactatgcaaattccttgaattttgaatagcagctttagttttctgcttggtaactaacgacataaaaagagttacaaatttggaggaagtttcaatatttcaatctaggatagtatttaatttgtaatatttactgttttgagttttttcctttgtgtaacttttagtttggttctttaatttgcttaattttaagagaatattttgttatatcctcgttttcttaaaagttgctacctttttctgttctggaatcaatattttaagataattcaagagaaagaagggaaaaagagtcttttcttaatcctctctttgtaatgatcatactctccactcagattgatgccttttctttttctttttaccaaaaaagaaagataaagcataatcttactgtaaagagaggaaagggggaaaaagaataagggtacagattttaaatctttctatcactgcgaggattttttttatatcggtaaatattagttgtcggctgtcagtttttgttatcggcaaatgatttgggttcatctgctagaatgagtaataatgacagcctgaaataaatgaggtcttgaatgtgagtaagccattctagagtattatatgtggagttgaaagcgaggggcttgtgtaggtaaactgatacttcatctaatggtttaaacattgagggttagttgaatactggcattaaatgcatgcactgagttcttgtacatcggatctgccaatacagtcctttgaaaggactcctttctgagctaatagaattttcaagatatgagtagatcctttattctaatggctttgcaaatctagaagcacaaacatataagtagatcctttattattataatgcaaaaggtggggtaagggcacaagtggcagaatatttgaagcaaatggagactgatatggacactgatacacaattgcagaccttgttcatgttttttctttctaattatctccttcacactacccttcaatttttataaaactatattaattgacatcaataactatttgccattttccctacatagcattcaacctcttttccccatctttatcttattttaagaaattagttgttactttttgatggagaagcaacctgagattttacagtggataatggcttctgaagttgaaaaggtttcatcagaaattcatgttaatttatgtactattttattactcttgaagaaacaactggctaatgtatgaataaggttgtgaaacatagcacatacttttttatcttttgacttcgtaggatttcttaatagatgtggcagtaaaacttttccattctcatggggtctcctctgtgtaattgaaggttagggccgggatggagatggcaataattgatgctgttgcaaatagtattcgtgtgccactgtggaggctttttggtggggcttcaaataccataaccactgatattacagttaagttcttactaaatctcaaagaaaatgcttataatgaaaattattttacaaaaatacgagaaaaaaactatctgctagaaagaaatctaagccagcttatatgtgcagatcccaattgtttctccagctgaagcagctgaattggcttctaagtactataaagaaggatttaagactttaaagctgaaagtgggcaagaatctgaatgcagatatagaagtgcttcaagctatacgtgttgcacaccctgagtgtcagtttattcttgatgctaatgaggggtataactctgaggaagcagtggaagttcttgagaaactacatggttaaaagctctacatatatagttaaagtttttctccatccaattaattgtcattgtcttgcaatgcaagaaaatgtacacacacatgcacaaaattgctcatgaaactttattgcagtaatttacacaatctggccatgaacatagatttgttttctattacagatatggggttaactcctgttctatttgagcaaccagttcatagagatgattgggatggtcttcggtatgttggtaatatagcaagagagagatatggagtatctgttgcagctgatgagagttgcagaagtataattgatgtttacaaaattgtggaagggaatgttttagatgttattaacattaagcttgccaaagttggggttatgggtgcccttgaaattattgaaaaggcaaaagcagcaggattagatttgatgattggtggtatggttgagactagacttgctatgggttttgctggccaacttgctgctggccttggctgttttaagtaagaaacatcttatgtttgaaaattttgggccagttgccagtttttataacttcatattgttcaccttctaatttactaatgaatttaattattgcaaacttttttgtaggttcattgacttagacacaccacttctgctgtcagatgatccagttcttgaaggctatgaaggtacactgtgcctatatccatatcaatttcaggttttcatataaatattggtttggttgatgtctctgcaatctaatgacactagggtatttctcttgaacagtttcaggtgccacttataagttcacaaacgctaggggacatggtggatttcttcactgggacaaccttgcttaggaagttgtaattttcttgcacaatatgattccagataatccagcaaagttgctagtatatgctaggtgatttctggtgtaagattcattggataaccaatgattcacaccttaaaaggaaactgttcaagccttattcttggttggaaagcaagatacttgttgaagatataaaaccaatctttcaaccgtgcacctaataacaataacttcaaggataactgaatcttttctagccctatccttcaaattcaattgaatttcaaggcaatatagggtgagactgtgctatatatccacctttcaagcacaaaagggttcttgaatgacaaggcatgttagagacataaaaccaacttttgtctgcgcaagttctagaatttgtaaagccaaaatttcctactaatcacctttaatctcaatgctcttggcgagaatggagaaaaatatgttttacaattttatttttatttttatttttattttggacattggtgaaatacgtaaaaaaggttctatatataccgaggaatcaaatttaatatatgtttgtcaccctattacatgtaatgactttttgtatgtatgctatcttcattattgacatctttattaaattatttgcagatgttagagatgtttatgacaacacaagaatctggaaaagcataaatggacaagttggttaaaaaattgcctaattaaggtgtgaaactgtggttacaataacaaccatacgtgaagatttcttgtccggaatgagtagccattacctatccacaattgctatgtatttaactttttcgattcctcaccatatattctgtaaaagaaactgccttcgaggtcttgaaccaaatagtaaccagttgctacttgctaaaagctaggaaccgcatatgatatgagatatggatataatatgatatggacattgaaatatagcaaaaaaaaaattaaaataggcttaattattgaacttttggtttctacaatttaagctgtgtgcgattttgatcgtacgattttttgtttcagctaattaagttattctattttgaaaattaagcaaattcagtttcctcgtccattttgtttcacttaaaactctcagatattattacttatgtaactattaacaggcggatgatggaattgaggtatggaatgattctaaatgtttagaaataagaaacttagttgaagataaaatttgagaaggggtttataagatgtgaaattaaggaaagaaggaaaatattgtgaacctttattttagatgaaatttgatggtcaagatttttagttgacgagttctctgaattcgatatgcaaacattctgaatagaaaataagaatttgagggtcttagatataagaaaatcaacgggagaccaaatttgctaaattttaaaaataggttgacttaactgagttaaaaaaaaacttaaagagattaacttcgtgataaataaattatgaagttattgaaatttaatcattcaataattaataggaaaggaataaaatagagtggaatgcaatgcaatatataggtcactccattgtgtagatatattatgatgaaatgaaaacttattttgattccatcccataacctccaaattgggaggagatataaattaaaattttggatagaatggaacgaaatccattccattttattttaatttaacaaaatcaaataataaaatatattaaaattttattttatcccacttcattcaatcatcttttactaattcaaacatagccttcataacacgtttggtttcaagttttgaaagtcccaaactacaatttgagcaaaagtttgtttcttgtatggtccaaaaccttggtttgagaatttcaaactattggttgcaccgagttacatatcataaacctcactgcattaaattcggcttccctaaagctctacttttatgcttgaaatattgcacaattctactacatggaagcaaattcggtgtggcgagcggcatgctatgtaactctttgtgtggccaattgatcatttatgattccaaatactccagtgttgcaaggaatccgaaaaataattttcacactgtttctcaacacaagtggtttagatttatcaatgtgcgaaaagtcgaaaactacatgattgataccatacgttctctacaaagtattccaccatcatcgagctaattatgaacatctctaatagtataagaacatgtttaaacatcgtaagagtgtaaaacttattttaaaacagcaaaatattgaacacttacactacatcagatatagtaccaaaattgggccacgcaacaccgcaaagtctcagtaattcacccattttcttctaaatcacaacatctgtaaatattttatctctagaaattaacgtgatctcaaccattactgaactgaaaatgctcgtacagtctggcttaatccctacatatccttcctgtgaacttgtttgtcatactccactctggtttttatacttagtttctctctcatttcattaggaccctccagttacctgatagtttttcctcccatataaaactttttttttttcttttctttttcactgtagcaatctctatgaattcattgcttcatattggcttcatctttttgtgctgcttaggcatatcacaagaatccacaattaggcagtcatcacgtcatcacaatctctacagatggatggacttttaccaagtttgcaccaagcaatgaactcagaaattaaggctcagttttagccaaaagcaggaaagacatgtcggcttatgcagttcatctatggtatgtgccatgtgatttaaagaactgaaaatccgggtgattaacctgaactagccttaaccagttatcagcagcctgcaagagggaactcacttgttgagattcactaactccttttttcatccaaatagacccctttaacttataggaagccattgcaaaagtaggtatagaaatctttggtacaccatccatctcactgggataaaccagtgttggagcatgagtaggaccacttcctgcaaaatgtaaccaaaagaaatgttttgaaaataagtcagtattgcatcatagtgatcaaacaattacatttcacgtttttttgaagaaagcattattttcacatattagctgagataacatcaaccagcaagttgagtaatgcaccataagattaagaatcagtttctatttttccatatttgtcaattttaaattgagtgtaatagctgtaattgagaaaagattaagaaataagacaacaaacgatactaaaattctatttggttttattctaggcaggttgataatggaagcataatgattgccacaacgattgatggaaaatatagatgaaaaaaaaaaacttctatatgtacaagtgggtcacagtaagtcagaacacaaggtcaacttgttgtgacttactgactcttggatgtgcttactgtgcatgtccaagagttgaggcaacaatgcttttgttttaaagataatatagtcctaattggagagtcaatagataaatttggaaacacatggtaagtaagaagtatgtggaatgtaactatgtaagtttagcaacagatgcataaaccctagctcaaaggtgaaaatgggagaccatactgtatcacaaatcacacatgtatcttgagttcatcatgcaaaaatgacagaaaaaaaaaaaaaaaaaaagnatcacaaatcacacgtatcttgagctcatcatgcaaaaatgacagaaaaaaaaggtgatgtaaaccataggattctaggtagggtggatgaaataaagtgtctctagtgttatgcatgactaaaaggtaccattcaagctaaagtgaaaattttactgtgcaggtataagacctgtaatgtagtatggaatcgagtgttgggtaataataaactgacgagaataaactccacttaacatagatgagaatgttgcagtgggtgagtggacatactaggccaaaaaagaatgggaatgaatgcattagagaggaagttggggcagtaacaattgtgtagagaaacccagaagaatttaatttcaccttaagtgattttggcatgtatggagaagatttgtagaagcccactaagaataatagaacagatggagggtagccatattgctagaggtagaaagagattataaaaaatataggtgaaaccattaaaaaaaggatttagaggtcaatagtttatctagagaaatatttacaataaagcattatgacatcatttgatccatgtagctgactccttagtgggaaaaaggcttggtggtggtcattttcaaattgcaaaatgatttcccatggtgtcttctatcaaatcatccatcattaaaagatcaaaaaaagatgcagtcagttgcagatttgcagtcattctgttcttagctgcacagttgagaaaatgatgcagccagtttccacagaagtttggcatatggtaccacttgtgcaggtgtgagaaatgtaattgtaagtatgtgtatctagaagttgtgagacagagaaatgagagtaatgaagccctaatttaggtgataatattttgcattattgagagactaaattctattaaagaagagtagaataaatgaatgtcactttgcattgttgcaggataacacttgtaacttaggaggacaaaagtagggatttactcaaaaggaaataatctcaaaatgcacaggatgtttaatatagcaatacggagccaaaatcagtgctgtataagcaagtctaataagatgacattgacgatcaaacataggcttgaagttccataattacctgtcaagggtgtatggagtgtatggtatgttagaaagcatccatctaaatcttttaaagttgaacctgtgggtattcgatatataggatacctagaacatgacattaaaatatgttaacagaaaaaaaaagtattaaaacattagattaagtcaaagtctattcaaaacaggagagggggggcggggggtgtggagaagtgacacattagattaccatgccacagacacccaactgactggtaataaatcacagcttctcaacaacttgagggcaggatagtggcgtgcaagatcttgtatctgtcagaatattataagtataagatggacagatcagattatgggtaaataagtcacacattaactaaggatcagtaattgccttgtcagccaagggttcacgactatacggaggatcttgttcaaaatactcaaaaagtagatcttgaggattcccagtttcactatcatcactagaaaatccttcttgcacagtactgtgtttatcatgtatagatagtgtgttcatttgcagtgagacaccacctgttagatactgactacttctttgagtcataaattcattcctttttccatattcataatcactacttccttcactgcatgaatctctgtagtaatcaccatcactatcttcactggtgtacctaatgacataagaaaatcatctgattggtttcaagctaacaaaacaatagcccacatttgtaagttataattacatagaagtaggacagtaagttaataaattacaaaaatagcaaagtaaatttacatatttaaaattacatattacattgactacatacaaaaagcagtagccagagagcgagagagagtataaataaaaaaaatactaaaaatatatccaatatattgagatcaaaatgaaaagttaatccatcaaaagtcaaaaccaattgatattatacaagaaccaaattgaaaaaataaatttacatttttaaattttgaagtgtgcttgtgaaaaatggaaggaatgaagaggaggaagtgagatttgattagatatcagacaaagcacacatctagatatatcactcattcgcactcttctagttctatttatcctgttttcacttctaccaagctcaatacaaaagagatccctgaggcaatacaaggaatcacatcaaatattgatcagataaacaccatatcataaataagaggactccccacagtctcaaatattgtgtttccaattagcctacacccctcacaacattttattctctcttccagctgacagcctgtttttttcaaccaatcatgtctaaacaattaaaatacaaatcaaaacatgagatactgcacaatttctgcataccaattacaaaaacaatcttttgtgactctccaaccacttaacatgttaactcatcaattaatgattagtgctactgaatactgtcacctgaaaccaccaaatctaattcaaaaggcaacttgctaacattataacttatataacccaacaaaaatgctgcaaatatatatgactccaattacaaacaaaaccctgcctttcattaacagcttggacatcaaataattcactcaaaagaagtgaaacaaacactagaagcacataaaatgtaagcaaaagatggtccttatgagtcataacttgaaaatttgcacatataatgtgcaggatcgatgactattaaacaaattgctacatgcacaacgcccagtaccttggcaattttgtccaaattctaacaaaatagtctaaattctaaaagtaaaagcatgatgacatcactttgtgaaagtgtaacttcaacaaaatcagtgctttaaagcaccatttcatacacttcccctcaaaagtggttttaagtagaattatatgttttttctataagtaaattcctaaaactaaatgattttatgccttcaatataaagtttgataaccatgttccatacactaaaccctcaaggaaaatctagagtaatgaaaaaaaaaagttactcattactctttactggaagggaaaagagggaagatcaaattggtgcttaaatttgttccaaaattcattggaagtgaaatttaggaaacagaacaaattgaaatgactataatttataaaagggcgatgcaacattatcattgtatcaaggatcaccctcaataaaaccaaatggttataaactattagatttaaacattttctttacaaaatcccaaacaacaacttttattaaaaggaatagttgctattgacattcctcttgagggtaaagaaattttgattgaaaacagtcaaaaccagctaatcttctattaatacagataacaatatcatctttctggtttccaccattctgaactcctgcagtttctatatctatgagaagcattttacaaagactaaaaaccacacttgtatttctaattcatttacttctcaaccttttcctgttgcctttcaaccagaacccagaaagcatattcaataccacatataatccatttaaccaatataccctatacgcagatgggctgaagaggcttaaccgtggggagatataagcgttatccacaggaatgaacagcttcgtagatctgtggatttcacccctacacacaaaattccactctcctctgtctcactcaagtgattttttagcttcccttgttggataagttgattttgattcagaatcaaaagaaagttatgaaagcaactgaataaatgttgcatcaccattaatttgcttcctggatatgcacactcagcatttacactccatatggaagaggccatttgacatcttggaggcaagatcaatcttactcttgatttagttcagccacgtgaaccatacagtactcaggaagcaacaaattgttgagagaattattatagaaagcttctgcaaatttttagagccaaatcacgaacttaaaaagaaaatagtaaaactgaatatattttcaaattttcattttctgaaaatagaaaaacagaaagttaaaaccaaacaaattttctaaatcttaaaactttgaaagtgaaaataagaaatgaaaatagaaaacattttctcaaaccaaacgtccccttagccactgtataagagtaaaaagattaacacctggtatatcaattgattaaacacattttttttatcagcaaatgttagttgttagttgttagcgagactaaaagagctgcatccatcgacaattctaacatgtttccagtgattagtattgtcttaaagttaccaaaattcttattaagcacatgaaatggcaataccttggctttgcacttgacttctcagcagagtgaccatagagttgaatagctgacaaatacggaacataatactgaacaacagaatcactttgatcaagcaccaaaggtactccagctccgtacgcactccactccttaaaagactcccacagatcactcagtgcaaagtaagactgatactccacatcgcaaaacttccatcctctcatcgttgtctacaatcacaacaacaacaattccgataatataactaacaaagtataaaaaatttgcaacaataactgtttcaacatttcaaaagcaaaatcaaattgcaaagaaaaaaataaattaaaaatatgaattcagaattcaagatcaaccttggagaaatactgagccggaactgatggtgttgtggactccaagaacctatcgatgttactgacagactctacggacggagaaagagttggtttcagagattggctgagattgctatcgctattgctgttgttatcctcagagacatcgactttgctcttagaagctaaatccgcattttcaggttcgttgttcttggctctgtcactctgtttgcgctgattctggctctttcgaaccttcaccggaatataaaaccgatcctcgccgcgaacgccgccgaattgcagtgcagttcccagcattttccaatcgttttcagaactgcgttctcctcctcctcctccgttccgtcgccaagaaaacggaggaaatgagaaaaatcgtaatcgctgagaggatcaataaaaaaaaggaagaagagaatcagaatcggtgatagaagacgaagaaaagaaaacgaggttgaagacaaagggaagaagacaaggcagaggaagaagaaaagcttcaacactcttctttaccacgaaacagacagagtgtgcatagaaggtttggtggagattctgtcattttccgtttgcttggggtgtttaactgattctgtgaagttttggggttatttgttgaatttgttggactttccctcaagagagtgaaagaaagaccgaaagagtcttcgttattatcacttaaattaaatgtcgataaataaataaataaataaaaattacgcgaactttcgacacggatgagatcggcccactcgtgatatgccttacattgactcgtgtttttttggctttatcattgaaaggggtatttttattattattatcattagacaggtgaattttaaatttttaatctaacatatgttattacttatgtattttttaattttaaaaattgaagttatcaatttttttacaacattaatataattttttttaacatacaattttaaaattgtaaatttgtttttgattttgaagtcatgatattgttttttttatgttaatttttttctttcttaattttttttatgttttgtttttaactttttttatgtgacatttctttaaatgatatttgttaaaaaaattataaataattttttaatctaattatttaataaataacagtagaaaaatataaaatatatattaaaaattagatatatcaaaattaaaaaatataaaaataatataaaaatttagaaaatatattaaataaagtaatattaaaaatatagacagtataaaataaaaacatacaaaaaaaaatatacaaaatactaaatcaaactaaaaaataaagaaaattatataaacatttttcaattatgttttagtcatcgagataaaatatcatttaatattattaattattgtttttatctaattctcaaatgcttttagatcaatcttcatcatgatcttcattatttttttaaaannnnnnnnnnnnnnnnnnnnnnnnnnnnnnnnnnnnnnnnnnnnnnnnnnnnnnnnnnnnnnnnnnnnnnnnnnnnnnnnnnnnnnnnnnnnnnnnnnnnnnnnnnnnnnnnnnnnnnnnnnnnnnnnnnnnnnnnnnnnnnnnnnnnnnnnnnnnnnnnnnnnnnnnnnnnnnnnnnnnnnnnnnnnnnnnnnnnnnnnnnnnnnnnnnnnnnnnnnnnnnnnnnnnnnnnnnnnnnnnnnnnnnnnnnnnnnnnnnnnnnnnnnnnnnnnnnnnnnnnnnnnnnnnnnnnnnnnnnnnnnnnnnnnnnnnnnnnnnnnnnnnnnnnnnnnnnnnnnnnnnnnnnnnnnnnnnnnnnnnnnnnnnnnnnnnnnnnnnnnnnnnnnnnnnnnnnnnnnnnnnnnnnnnnnnnnnnnnnnnnnnnnnnnnnnnnnnnnnnnnnnnntcttcattatttttttaaaatcatataaaaattaaaaaatatatatattaaataaaataatattagaaaatatacaaaatgttaaataaaaatatacaaaatattttcttaattattttagtttcatttaatatttggatatacttttgatatgtttttatttaatatttaaatatttttaatattattttatttaatatattttctagattttatatatttttatttaatatttttattttttaatatattattttatttaatatattttctatattttttaccattatttattnnnnnnnnnnnnnnnnntgtcatattttttgcatatttagactaaatttatatttttaatcttttaaagattaacttatcatcacattatatttttaaggacgaacttaattatttatccactaactaatatcataattagtacaagaattaaagttaaaaatttattaaaagtgtttgtcgtattcacataataattatttactatttatctatcaaaataatttaaatattaaattaaaaatagattatatttttcttaattgatatatttaatacacttaaccatatgattaaacataaatcattaatatattaaaattaaggttaaataattcatatattacttaaatttattctttattaaaaataattcttaattagattttatttatttattagtcaaattttgaattaaacggatctttttctggaaaagttaagataaaaaaatctttaaaacacttatattcgagcaaaaatgaaaaagacacttactaatataagataagaatgaaatagatgacataatcgaggagcttactagttaagactcataagtcataattcaatagttaggtaaatttaaatgtgagatacaatcaatattttttttttatctttgtacgtcgagttaaattttatttgcatcttttaattttatttaattcgttttaaccctctaaattattttttcattttcgtatttttctgtcttccaacttaatggatacatcttataagaaatctacatggctatagtatgcttaatttaatcacagttggcaataacactccacgcaaagtgtttccgttttggttacctttagccgccactaataagatacccattgtttgaaaaaccaatcccaccaaaatattattttaaataaataaaaaatatttttattttaaaaaaataaatctttaaagtcattatttaagaatgtggcatatggtgagctggtagctccaaacacattgaattgaatattgagtaagacttggtctgtgttgcagctgcatcaggggaatgaccttgctgtgtggaccattgagtttaatatatatggatcattcaatctgaactctgaagcaaatggttcaaattttcttttatattcgtctgcaattaaaacaactcattcaatataaaacaatgaattgaagtgaaaaccctcttatgatactgttttaaatttaacatttctagcttattatagtccagtcatagctttctctacagcatcattatgccatagtcaaatgtcattttaaatcttttaaatattctagtatattactaaatgtatggattaattagtatggtattattttaattaacttatccaataattttaattagttttaaatatgtaattatattaaataatttaaaaaacatacatactcaacaaaaatagaatgaggttcttttataaaatgtaaacttttgcgatattggagttttttcatctcgtgatcttatgaacatgtttttattttggtcaaattttgaaagtttaattctctttttcgctaagcagttcattcatttaatggccttagaaaatatattaattaatttttgttaagataattttgtgtaaataatcaaattcgtatttaaaaatatgacgtagtaaagaaattagtctataaaagatgaaaatataaatttagtatatgaatttacaaaaaaaatatgataaattagtcatgtgactaaatttgtaaaattattttattattaagttgtaatgtttaaaaatcaatttaataataaattgtatttttttaataccaatttaacattaaattacaaagtttagagactaatttgtttataaaactaatttgtcatactttttttatattcaatatctaaaattgaattcttcatctttcaaaatcaatttgatagagcatcacactttcatatagatgaatttagctaattatcctctaattataataatattattactatttaatcatattttattgtattactaccgctttgaaaaaatgttgactatgacagtaaaatgaatcaaaattaatttttgctgcattatttctgctcccttttctttgggttagaaaaaggaaaccatcatctacgtacgggacgatttgcttcccgacagcaacacaaaggaaagtaacaacaacgacggcaaacagtgatacctataccaaccaccatttctttgactacaacaaccccccaaaatatgtcgagaaattaatggccacttaattaaggattaaatgtagttgagactccgatagaaatcatagaagtagtatttgtttttatatttatatttttttaaaaatctttttcaagtttttatccacatagatacaattttttttaaaaaaaagttgtttctaatttccaaattttactgttcaattttacattttataactacaagcaccttaatttattactcgcgttttaacttttaattgaattaactatgttttcttctttcactgtcctttcttttttgaaaaagagataaataaataatattttgatgataaactaacttggaaaattacttcctttgcactcagtatataagaaaaacaactaattttattttaattttaaaaaattaattaacatcatttaattttactaatattaagtaaaaaataaaattatttctaagatgtctttcatttaaacttaatatcatgaataaaaaaaatcattgataatagaattagagttaaatcaaggatgttttagaatgataacacaaaattagtaaaatttatttatatttaagtctaacatacaacattactttttatttatatatgagtctagagagaatattattgaatatgtgaatcaaatgacctaaggtattttatttaaacattaagtatgtaattggattaaataatgagaataagaattttgtcactcacaataatcctatattattcaagtagattacttcaaatagaaaaatattagtggtttataccataaacacaaactaggaaagctaatttttttaactaaaagtgtaaagtctaacacaatccaaaaatacccaaagtaatggtgacagtctatttagaagctgtttaaaagcttattttgtgaattcacaaaaataaagaagcttattttgtgataagaattataaatatattggaggaagagtatttcagactgatattttggttatttttcaatcaaattggtctgtctgatctaattttaataattataacttgtttatattaagttatttaaaaatatcttaacaaatttgatcaacttcaacttcattaaatttaataaaccagaatttcatttgacgttgaatctaacctaatttgtcctttgacaactcctaattgttttctcataaaagatatcttttttattatttactgccataaaagatatcttaaaactggatagcagaagttattttaggtttctaaattatcatcaacgactaattttgacatttagtacttatcagaaaacaattgtgtatttgtgttatttgactacaaccccaccaaacatattgtatgattaatgtttcaattttgatgaagaaaaatgcacccatgccatgtctccatcaggattgatgccatataatgggtggcaaagaagagcatgtataatggcccacactggcttgaattgaggtcgagcctttgcatccgtctatgtttcatcacaaaagctgaagaagataggacaatgatgtgatagggtacaagggggaaaaacagggataggagatagattacctattgacattaacatacacaaattatcattttcaatattcaataaaagggtcccttaggcttttggggttagtatggtgtgtccatgtcaaggtaaagctataatgacaacatttacaatttacctatgggctcctccatgtagcatattctgaattcattttgaagatattccacagcaaggaagcttctcaatgtttgaaactcaaaaaatatgggtgactttaggattataacaaaaaatgtttattatattaaaataaaagtataataaataaaaaaaatattttatattcatttgtctaaaatcacgctgatgttcataaaactcaaaaatatatattgcaaagtaaatgagggatattaattcaactattagaaatgaattgatgtaaaaaagttagatttaatttttctattattttttcattatccaaaatattattaaaagcttgaataagtgcagtttttttcttactaatttttaaggaaaaaattccaagaactacaagggaaccttgacttgggaatttttgagtcttgtagatgtgtgcgtgtagctggcgtggatcgtgcagaaattgacttaagagctaagaattaaagccatgaaggacatagataatgataagagaaacaactgattgattaaacccaaatggttaatatactaaaattaagattgaatggtttaagtattacttgagtttaatctttgatgaaaataactttggatcatactttacttatctcccaactagactctgaaatagttagggtctcttctccctatatgaagatgacttgctaataacataagaatttatttataaatttcaaaacttgtaaatttcatttcttatttattcaagttaacttatgtgtttggagattattgtttttttcactgtagtagtactttctaatttaagctattaataattgatccattggagaagtatccgctagcagcccaagaagttaaaaactccaggtcttgctatttacactacaattttcgaagtgcacccccatactttccttttctatttctcaattacccattatatccttttttccaaagaagtacactccttttacttttcagaaatgtatttccgaaattacatgtaactattccaaaaatgtatctccaaaactatgattcatagtttcaaagatatacttctgaaatagatatatatttttcaataaaatatcacttaagaattaagatagttgatgagaaataaaaaaatgataaacattgatcttatattcatgtttgttaatcttattttcactctatcattagtgttttttgaatctatttaaaatcttatttttattttatctttattattctttaaaccctaattttaaactatcttcaccatatattgttatataataccacatttttatcattattatacaatattttatatttttcttcatgtgacactacatttcagtatacgttcatcactaacttcatatatcatacaccttaattacaaagcaaagcttttgacggtggtttctttcctttaggtgcattcattcattttctaatccaagtctacgtcaacgattcagcatcacatgaagttagtgatgaatgtatcttgaaacacattatcacatgaaggaaaacacaaaatattgtataacaatatgaaaaatcagtattatataataaatatatggtgaagatagtttaaagttagggtaaataagattttagatatgatttaaagaaaattaataatatgatgaaaataagactaacaaatataagtataagataaacgtttatcatctttttttatttctcgtcaaccatcttaatttttaattgatattttattgaaaaatatatacctattctagaagtatatattccaaattatgaattataattctggagatacatttttagaatatatatatatatatatatataatttcatgaatatattttcagaaagtaaaaatggtgtacttctttaagaaaaaggatataatgcgtaatttagatgtcaaaagggggtatgggtgtgtacttaggaaaaatgaggtgtaaatattaatttccaaactctattaatacttcccagagtccgaagtatttacattggtcagtttcaactttcaagcctgttgttgattgggccgaatctctattgtaaaaaaaatctaactgccaaaatcattggttccacatttattatccaaaataattttcaatgagacaaaggagggcattcctattcacacctccaaatgatgaaaatactactaacacactcccatatcatacagaaaacaaatttccctgtgtatctaccaagagacagtgaaaacttgtttcattgaccacattgactaaaaattaaaattaaaattattgaaaatgttagaaatgattcctagtagaaaagatttacagtttggaaaatgaaaaaaaatgctatattgcagaaacaaaaatcatatttaaactaaattaaattcattgagtaaagtcatctttgcacgcaaagatatataaataaataaaactaaggggaaaaattcacgtgtagaaaattttctacttgtggtgaatgcttccaagttgtaacctttactctaaagtgtatccttgatttgtaatctggcaattggcatgttgaatttgattcgtccttaattagttaaccttttacctgtccatttgcttagtaggaatttaaaatggtttatacatttgactttgtcaaaccaatacatgcatccacgaatcatatatcatatatcatctatatattatattggtcagatcaacatcatcattagaaacaccagcgtaattcaatcctctaatcttcaaagaaatgtgtagtgaaggttcagatacagctttgaaatatttgcatatctgttgaaatatgtgaatttcggtgtgtacatacacaacaaaacaaaacagaaatatataatcaaacttctaattaattaagctttggaagtggccagggttgaaggttcataacgaagaccaggattggaacaagaaacggagcttgtcaaattcagctagccgctattgaaaaaaatgaaaaagtcaaacgataaagtgaatattaaaaaagaaccaggtcatgtacaacaatcactcatattgtatacctacccttgtttcatttgaatcatttctcatcttgtgcttcttctatggctaatttgcttatggataatgataataatgttcatatgaggttcttattccttatatcaatattcttcttcttaacagcatccattagtgctgaagataacaacaccaaacatggagtgtagcaagccatacaactgcggacaaatttccatattctactctttctggggagggaacagacccagttattgtgccaggctgccagcaacaagcaatataagctcaactgcgagggtaatcaaaacaccaccattcaacttggctcacaaagtttccaagtggttcactttgatgatccaatgaccatgacaatggttcgaacaggccttgtctatgatcattgtttctcctcggccttaaccaactcttcctggggctcaggtctatttcgttactcgacgaattttacaaagaaggtggcaacaagagtgctttctatggggacccctgaactgaaagagttcaagattgtgaaggacctaggattgaagtgtaagtaacaaaggaacatgaggttggtgaaggaattcaagggctgaacaaagctttgagtgaagggttcaaagtgcatcttattccagaggctcaagttcaacagtgcttagcatgtcttttatataatggaacatgtggggctaatgatgagtctcagtttacttgtttttgccaggatggaactgaaggtttagattgttctgatcatcatagtatgtcttctttctcttctcttctcttctctttatttatgtgtagatatggttttaaacttttaagaatagattttttatgcaaattgattacatgaattgaagcctttagctagcttgtatcaatggctgttctagaaaatctgtagaacaaggagccctctgaaaacataggtattagatgaaaatgttattggggggtgctgaaaataagggtgaccaacaattggttgcttctgagtttgatatttattttcctgattctggttgaggagaggcttctcagaaatcctcctcctacttcttcagaattttcagtcagtcatcaaaaggaatagcatgctttgaatttgtttagactttcggacatttattgtcacatttattttatcctttggtgctgctaatttgctcctcacaagtattgcctggtgatgttatatcttcctctgaatttgtcaatggtctaatcagaatttctactctgtgatttggttcttttctcccctctgcgtctaaatctagattttgtagtgtaattctgtgtgaacttgttgtgaattgttgactttgactattttgggttgcttataaatcatcatttttttctataaagtttactaataacaaatttctaactcatcaaaagtttttttcctccttcaaaataaccattaactgttttggaagtgtaacaaaatcaatcgtagttcttagacacaagcatcaactatttcattaaaaggttcattgatcgttgtcaggcaatacatgcttaattttgacaattgttaaccaattagtctctaacattaccaaaaaaacatatttagttctgaattgaaaactatcaattgatttggccattgatgtgcataaagtttaggaatcaaatcgactaatgcatattaaaatggaagatcaaattgactgccgatagttaaagccagaaactaaattttcttctaataatatccaagagaaaattaaccagtatatagtaataattttatggatcaaattgattttttcctggtctcaagaaccaaattgatattttattgaactagagttaatatttgtgtgcttgaacccattagggtcagcctactcataaaaaatttattaggtggttcgaggaattagactaatctttacataatatgtaatcaagtattattaatctcttctataacttgaatacatatacatagagattagttagaatcatcaacacataatttgaaacaatctaataattttccccaacagcaagaatttgagtagtttgtataaagtcctaggttcaaatcttgttgccttcattgcacactaaaaaaaagtatttgtgttttcgattatcatgaactgacaaggttcctgcattgtatgtgctatgaatttcttggttaggcaaacttcacgatggacgtgtagttgcagtgcagagaatgtacgagaacagttacagaagactgagaagagttgagcaattcgtgaatgaaatggagatcctaacaggcctaaatcaccaaaacctagtgtcactatacggatgcacatcacggcacagcagagaacttctgctggtatacgaatacattccaaacggagctgttgcggatcacctccacggtcaaagagcgaaacccagcacacttccttggcacacaagaatgaacattgctatagagactgctagtgcactggtgtatctccacgcctctgaaatcatccactgagacgtgaaaacgaataacattctcctcgacaatcaattgagtgtgaaagtagcggattttggcctctcgcgtctcttcccaacttacgctacacacgtttccactgcgccacaaggaactccaggttatgtggatcctgagtacaattagtattaccaactcactgataagagtgatgtgtatagctttggagttgtgctgattgagcttatatcatcaatgcctgcggtcgatatctcgaggcgtatgcatgagataaacttgtccaacatagccatcaagaagatacaaagtggggcattgcatgagattgtgaacactactctagggtttgagacggatttcaaggtgaggaaaatgataagtgctgtggctgagttggcctttcagtgcttgcagagttctaaagatgtgaggccccctgtggcagaagtgttggataggttagaggatattagaagtgatgggagttataagagcaagcatgaggtgctggatatattagatgatgctgctttgctcaagaatgtgcctcctccaccttcacctgattcacatttggtgactatttctaattctgcaccaccaaatggtagccaatgatttagtgtgtgtttgaaaaacagtaaatctaacatcaacggactttcagatgaaattatgaaaagtacaatataattgctttgacatttttgctctagaaagtgtatgattttcccgttcaacatggattcaacgcatctccaaacataccctcaaattactgggtgtacatagaatgatagagctgacttggttatgacaagccatgacgacatgttttgacatcataatggataaaaaaggaatgatatatatatatatatatatatatatatatatatatattcttctttgttttaggaagtttttggaaaaaatctcatcaagattatgtctagcttcatttatggctatcatgtattgatatatagagattctactaattaatgaaagacccctaatgagaattagactcaaaaccttgaattgatgtattttgatcctgccagttgatgcatctcttgtaatcctgtcatgtttagcgtgaaagcttacatcttttttatttgttacagatgaaagtttacatctaatgataagaatttaaaaactatattttccaaagttctatcatctctcctgtaaccttctttgtttgatgatgggaaacttgcattgctcaactcttaataaatttttccaaagttctatcatctctcctgtaaccttctttgtttgatgatgggaaacttgcattgctcaactcttaataaagttgatttacctctttttcttaatttgtttcattctatgtatccttgctctggcatcatattctgtccactaattaccaaatcttcaaagagattcttagatacttaaaatatgatacatttaaagtgagcaaaattttattgtaaaatatgataaaataacatgaaggaacagactcagtttgtggattagatactatatatattttgattgaattactgtgctacttttataataatgatcacaatacatactatttcataatggaggttttggaggttctgtattcgagtcaaaccaaagcctgctctgccagactttccgggatatattcatgatcaaatattcctaaatacatataaattaaaatattaagaaacaggaaagaggaatcaatttatgctaaagtgagttacatttattcttacgtcatttaataattttatattagataattttatagttttatttaaaatcaagccttaacttcctatataatatgactcacataaaattctagattaatccaaatttatttaattctacatttaagtatatacgaattaatgaaatatacatattgttttttattttctgtaaaaaagatctacatatatttatttatttttaccaagatttaatagaaataatttgacaattccgtcaagatctcttcattagttgggggaagagtccgcacgaatcggattttttgaggaacatatggagagagaattggattaaaaattaaattatcaatttagtctattaaattgttattcacattgtcattgtaatccttagatttaatgaattcagaaaagtcatcaaatctacaatccaagctgtctctaaatttaattatttattattatttagtccctaaacatatatcttaatactatcacttaagtcatactatgcatgtaattttgaactaaaacgagtaacaaattataattttgaaaaactttcttaaattataataattttaaagattaaattggttattaactctttgaataatataataattatttaatatttagataaaaatattttatataaaattataataattttaacaataatataaatttatatttcctataaaaaaaatatagcagccaaaccaattcttagtgttttattttcttcttattatccaaaccccccaccccccaatactgtgcaaactctgtgctgaccttagtgggttaaaccaattctgggcaaaatcctttatgaatatcacccattgccattgggttgatcgtggagtcattttcatgagtaaaaaagggcattcaaaattagccagtgtcaaatgattttgacatatttcgtttagtagtctctgccttttcatccacttgataatgcaacagtctccagcactaacaaaacttgtctttttcaacttattttcatcaacgttattccataataatttctatgctcttattctctgttccttccacttatataaagtgagtaaattggattataagagtgagtaaaatcaccccggccgttctaattttgaaaactgatttattttatttttttactattgttttatagtaattaaaactgaatattttttataaaatttaaaattaacaaaaaaataataatttaatctcaagaataaaaatgcatgagaattatgatttaatttattcgatataaattactttctccttgcctaacttttctttttttgcaagattatgcaagcgaatgtggaattctgttctatgcgataagagaatagaatataacatgacccccaatgattaagttcattttttgttgaataaatggacaatctacgctgagtggaaggagatttgtgaagaaagggacccactaaacttccatacttataaaatcaacctattgaaaccattttatacatgataataatattattactattgtaattgtcataatcaatcaaacccccaagtggattacataatggtggagaatgaaagctaaaagcaatctagagcattaatttccatccactaacatgctatcagaagcagccaagaagaccatcaatcatatttaaaaagctaaaatatcatctcagaatgaattaaaattgatgaaaaggcgagtagttatagaggacaaacaacgtgattttcaaagaaattattattacgttgtaacaaatactaattggcatggcatgttcatcttattacgtgccaaaatgtgtcgcttcgctctaaacccaaaagatatcttaaccctatagtgtttggaagatgttgcttaattattatttgggtgtggatcatatccacattcataaaataactgcacatgatgttgtccctttaaataatgtatataacatggccatatttttagctaaaaaggctgttaaacaatgatttcaatggttagattataaattgcatcaattcatcaatttataaaaaccgtgatcatggtgaaatctgtcgtctattacagggactatcaaacgcggtgacattgctacagagacatatgaaattacacacgtgacattcacgtggaggcggttgcatgtccttaattgaaatccatattctgatgtagaagtttatgcaaagaatatctatctctgcagtatactatacacttgatgagacgaatgagagtcacttatcacttaggcgtgtgatttgactccaagctaaagtagagcataagggagagaaattggagataaagattgatttgttataataatcgattaatcattgtattttataatcacctcaattatttaattgaaaaaataaagattgtatctaatctaaacctaaataaatatacatttagacgacgtttagtaaatgtgtttgaataaaaaacaattcataacatactagttctattccatgacatttaaaaaaattaaataaaatgacacttgtggttacaatataacattttagtttcagtaagcaactggattaaaaaagataaaataaaattacagaattgttctattttactctgtcctaataacaaaagttatcttctttttttttatcaacgcaaaagttatcttaatcattataaatatcattgtttgattttaattgtattatattttgagtttagttttctttaatttttattcgaatggtttgttaatagttcagatattatatcaaatctcttaagctgtgatgtgctatatatatatatatatatatatatatatataaacatattcttaagttaaatttattatatgaacttcatgatttttggtctaaaacatgaatttcatgattgatactacgattcattttctttttctctcttgttctccagtctcgttctctctctctccggtcaacaaatgtaacaaatcaaatcctgttcgtgtttctttgtacgttaccgaccgtatgaccaatctttgcaacagattcaaccctcaaaaagtgacagtgacactaaaaccttaattaacccagtcatcaagaggagttttagttatttatattaattcgaagtatttttccatctgagagtcaaggagtaattcccatatatgttacaccattttggtggggaattcaatatatgtaaagatttgatgacaaaaacaaccaagtcattcttgattcttcttctacgtgcttgattatgttccgtatggatgttcccgtgctttgcgctgcagaaacatgaacccgaaaagaaaaaaaattaatagacagtcaaataatattacataactagagagataaagagataaaaaaaaagagaaaaaatataaatatcataagtactatgatataatagaaatagagaaataaaaaaaatagatgtctaattgtataacaggtgttgggatttttttttataaaaactaatattaattgaaaatttattaatttttttagtaaaaaaaactgaatttacaatttttattctttttttctctagttaaccttatttgtataactacggactccaccctaaatggcatccaaaagcaaatgttccaaaatgcgcctttaaatatgaaagtctatagtctatacctcaatcaagtagtacactacagtgatgccttcgaacaaggtaagcaagacaagactttgtgcgtcctgtccaacattacagtgtcttcattactcgaagaatgaaaaattgaggcactcaaatcttttcagttttggcaacagacagccagtcggcaagacaaaaacatagctggctcacaaataatctatatactatagatcttgaaataattataatcattatctttaatattgcttcatcaaaattaattaagaaaagatatcagtatatccttcacatatcgctgcatatatagtgatttatttataatgagaagactagatgagaaaactctctcccccactcagcgaattaataaatatagtgagcttacaatttcattctcatgagtgataatttttcttgaaagtctttgaaaatttgtgtttcggagttggccttatgaaggtctatagctaatctggatgaaatccgtttaacaagtagattttagtatctattgaattaaggtcaatcacgtatttgattaaggcacatcatacttaccctaagattgttaattaaagtaataccaacatataattttatttcaaaaaacataccaacatctgaggaacataataaagtctcattatccatatactactacttacagcaaaagacttagggtactctttaaatatcaatcctgccatatcacaatcatttaagagtttgtttgatggtctgaatatgataaaatataagaataagataataacaagaatctattggtcacaatgacgataaataataatagtaatgatgatgaggataataatataatgttggtaacaattgtgatatgacagtgactagtgagaatagagttgaaggtgatgagatagagaactattattttattatattactttttaactcaacttttttttcatataagaaatacattgcattgatgaaataattaagatagacatacataagcaaatcatgttttattggtgcattaaacatatatatgattacaataagattctatcatattctgcctaccaaacaggtcttgaagactcccaaattttaacttagagaatatagtctatctatgggaaactgtttggctcgagtagacatctttctcatatccaatcctccttaagttcatatccataaatagcaatgatactctccctaagataaccactactacagcaagcattttttacgtcacccaatctaagtcggttgtaacatagccgatgttaaatcaagttcagtggcaaattcgtaataaattgtattttgtttgatagacaacgtcgggttttaagtgaccgtagttgtctttaaagatacgaagtcggtttgcaaaataaccgtcttagaaaggattaaacattttaaaaaaaaataaatttttttgttttaaaaatttcgtggtcggttttatttagcaccgtcgttgtattgggcctttgcaaagtcggtctatagttttaaccgactatgaatgttttgatacaaatttttttttataagaaaaagaaggaaaataaaacctattataaactttggcccttttcccccggatgccctaaaagctcaaacgtgcccgtgccccttcgacctaagctcaagagtgttcaccactggaagcctcaaagcccccttcgacacagcgattgatcaagaattacgactattgcatcctcaaaggtaggttttaacttgtattcttcagatattgcggattccttcatcgtcattgttgttgtttgattttatttgcagaagttggttcgaagagcgtaggttggccaccccgacgacgaatatcaacatcagtgccgacgacgagtggttccgccatgtagtccgccgcaagtacaagaggtcagggatccctggagctagggttcacagtagcttgaattcgaactccagttggactcagacgggttcatttgcaggtaacattctacacttagctactcatctggcactnnnnnnnnnnagcaaaggtatcaattggggcgtttgtttgacgaatttgattatattccttagaataatattcttgaaaatgttatttccatcaatcatgtttggtacatatttttaattcatgtgaatgtctttgaatttattttaatataaaaaaatattaaataaacaaatgaggttgaataaaataatgagaaattattttaaacatctttatgaaaatgtaaggttccaactcctttacatgataatgataatagaaaaatggagaaacatgtacaatattattttttgaaaataagtatgtttcggaatatttattttttgttaccttctaactaacaaacgaatatgagaatatatatttacatttttatattttttgaaatctaataaaattatgtgaaaaaccttaaattgtcaatcctatgagaagtttttttaaaaaaaagctagtcatttgatgatgctcgaattttgcccctagctagcttctctgccattagattaatgaataacaaaagaccggattaggttgaagacgtacgtgcactggtgttatagtcttatgccttgaaagcatacttcactccacgcactagagattaagcatataacattaatcaatcaagcacaaagctcctgaagagaagaatattatagtggtccagaaagatcgatagaggtgatgtagggtcagggtcagggatgacattttgctcacgtggatgctccatgttcatggctagcctagctagtctaaaaggattatgcatgtttcggttgtcccagtcatgaccctccgaatccacttaattctttgtaatctgatcttgttttgtactctagtgtctagaaatcatattaaattttgattcatttaagtcaaatcaagaaacttatttaagaaaataaaacttaatatttctgtcaaaaaataaataaaacttaagatttaagattttatttcaaaatataaaatatcttattactttttttacgagaaaagattcatgtgttacttaaacgtactaacatacacattgataattacactaattattcaagcatatcctggtttaatttgtttttagtgaatataatatttacatatataataatttgatttaattataaggattattcaactcttaaattgaatatgttaagtagataattctttctttttattttttctaattagcatctataaaagatgtatagctcagttacttaccctttcatatattttttttttaatttttgcagataaaaaaatagtttgtatttttttctattttcttcttttctacttgttcnnnnnnnnnnagtatggaagtgctttctaagtcggttgttgtctagaccgacttaatatgttatttttcaaagtcagttgttctttggggaccgaccttgacttggtgaaaaatacgaccctttctaagtcggttgtttatcagaccgacttaaatttggctattttctaagtcggttggtgatgggaccgacttaatagttaatgctttctaagtcggtttatactagtaaccgacttaaaatgatttctttcaaagtcagttcattagaatgaccgactttgaagttgtactttctaagtcggttaattttataaccgtctttgaaacttcgttatgcaaaaaaaaaaaaatacactttcaaagacgggttctttaaaaccgaccttgtttgtggtgggctttcaactacatctgagacaaagtcggttgtacaaccgactttgttggggttaaaagaccgactttaaatgtggatgctgtagtagtgaaccattcctaattttaacttaacttttctctcatataagaaatacattacattgataaaataattaagatagacatatataagcaaatcatattttattggtgcatcaaacatatatatgattaaaataagattctatcatattttacccaccaaacaagttttaaagacttcccaaaatttaacttagaatgtattctatctttggaaaattatttgactcgagtaggcatctttcccaaatccaatcctccttaaattcatatccataaatagcaaagatactctctctaagataactattcttaattttaattaacagcccaaattaccatttcaagcatttattaacttaagaatttgagtttaggtagaatataattgtcaaagtgagggttgaatataagtgtcaaaagtaagtcaaatttccaaaatgactcatcacaagttgaggaaaaagagagtcaattcaacctaatttatttttttgatgaacaaaaaaaatgacttgatctcaacctactgtaggttggtcggttaacacaaattttaaaaaaaattaaatcttgaaaatgcaaataaaattttggaaattttttaaaaacgaaaagaaaggaagaaaaaacaaactattattagtaaagccaaaaattacaataatttatcatcaccaatcttaataacatcatcttttaagaaatggttttaattaagtgatttaaaaaaaatgaaatacaagttgagtttgagggattaaaatgattttttaaaaaatctattttagttcctaaacagttgaagaacaaaaatcgtattttaaaaaaaatgagtgactaaaataatcttttaaaaaataggtaccaaaattaaatnnnnnnnnnntcattatgtataaaaaaagactttattaaaaaagataaaatttgtttcgataatctctacgcctcaataattagtttcataattttggattatgagaaccttatttccagaaagaaagaaaaatctagagttttattgcttaattattatatctatatatgcaagttttattagtatgagtcaatataaatgaatagaaattttttttgggaggcctaaatgaatagaattaataatgtctatttcttaataattccagaaaatattattggaaaattttaaatatgatagagaataaaagaaacatatatatacaagtgtatgcttaatacatcaaattcttttaagaatatttataacttcaaaaaaaaatgtataaaaaattgtttttcaaatcaacactaagtagtagttctattttttcagatttgttggaaattagtaggggcaactctccatctgaattaatgagataatgattggcttattcaaaaattgagagacatgaataacctatgaaaaggaaaacaaaaaatagaaaacttccgaagaagtacgaaatacagccgacaacacttgtggtccagtcaaagtgcatatagatagaaggaaagaagacgattgaatttgacgaacaagttgccactcacactccactacttcaatcgtacatccatgatacctctgtttggaattggaaggagatacttctactttttctattcctaagtcaacagctatgactacatatcatcttctgtgagactcaaaaagaaaaaattaaaaataaaactaactcatcaaaaatatactatatcttgtcttctatgagcattggtaattttgagaagaaaaaacagtggttcttggactgaacggggtatttataagtgtatttatagaattaatttattgaggttttgttttattatataattatttaaattaagaatgaaaatattttattcaaattataaaagtaatgtatgaccatttttttaaaaaaatatttttataataaagtgtacttaaataagcttatgaaccagcgcatttcaatcacaagtatgcttgtatcatgaggcatgtaagcagcttgttttcaaggaactaattaatacagtatactttttaagcagtcaatgcaattggattctctatccagaagaataattggccattgctcacttctctctcttttttaactaatggtgtactccctctctcaattcatattcatatatatggaaaaaaaatcatcttgtatcttagatttaaaaataaatataattaattttacctttatcaaatgatgtaatttataaaatatcttttatattgtaacggtatctagctaggtcaaatagccaaaaatgttatggtaaaatttttagatcactgaaacacatcctctagaaatgtcaagtattcaaccatgtcgaatacctgagagtcatggttaccttgtccttccaaggaggatcatgatggtatcatgtgctcgaccatgcagaatacctagacattgttgtcccatcttttaatacttctcttatactagtacaagatattcaatcatgttaaatacttgagtactattatcttatcgtttacagtttatctctcttatactagtactaggtattcggtcatgatgactacccaagtactgttaccctctaacatttactctcttatgctagtactaggtattcaacctgagtacttctatcttatcccttaaaaacttgcttaatattcgtataactaccaggtactcgatcaagttatatatccaagtaccatatttattacatatgtaacacacaccacagtgttcaggtattcagcatggttgaatgtcagatacctttatcccacgtaggactacttatttaaaagtaagattatctaaattaactaatagataaccattatggtaaaatttaaaatccctaattagaaatacattaaaaggtaaaatagagaaagggcacataggtctagggtgttaattctcatttattactctcatatgttgctcttgacaagggcgttggagtgtcttttgtatgtatctcactctccaaattgtcgaacactatattgcaaaggaagaagtcagtcaagaagacataagaaagaatgaaagttacctacctaccccggtgcaggtacattttggtgcccaccatagggcctaggtaaaattgcctatgccccaagaaaagcatggttgtgactacccaatctatggcagaagcataagttcgacaattgatgaccagacaacctcagcaagttcgaacacccttccctcatgttagtgaagaccatggggatacgagccctactagaagagatcataaacatgcagcagaggcatgttgaggacataacaacattacaaaaggagaacactgagttaagggggcagcatcactcataacacccttctcgacatgacaacccacaaccatcccaagtaggggtgtccagcatattacaaggcagtcatttgggaggaacaacttatccattcaatcttgtcagcacctcaatagctcttgaactcaggaatccctttgtcttagggatcacatatactctgttaccttttacctgaaaacgagtgactttggacaagtatgatagtgctatcgaccttggcgaggacatcgacatttatgttgtccaggtaggcctatacacgatggatgacatagtcttgtgcaaagcattccccacctctctcaaaggacaagcgttgagttggtttactcaccttccaccaaacttgatagattgttttgaaactctagctatgagatttaaaatccaatttgccaccaactggcctcatcatttcacgtatgttgctccagttagtctatgacaagaaaataaagagacactaaggtccttcatggaaaggtttggaaaagatatggagctcatgtcaatcaaattaaaatatgtaccttatttgttgattctaacaagtttatatgttctaccgaagtgtctttgtacgaatatgatcaaataatgactattacaaacacatttaaacatttgtgtattaataataaaacattttgatttaatagataatattttatatgataaataatttttttttattttacaatttaactatatacaatgttaaaattgatataatatgttaaagagtcagtttgactccaccttatcttatatattttaggtcttgattgaattgaagttagattcaaataaatcacccaatcaaaaatttgagtcaaaataaaaataaacttatctcttagtcactcctaatacatccgtaacatcccatagctatcaaaagatcactttcacatatctatatctaaagactcttttagttaccttgcactaggtaggttctgaaaagattgtaagaacattttgtaacatcaaaatgttaaaataaaaaataaaaaaaccatttatgatttttcttaaatatttaccgtataaataaataatgaaaaaattaaaatgtcatttcaatatttcaggaaaaatgcaatcgaaccaccaattcgaacaagtacttactttggtgagtggaagaacggcgacgaggaattttatgatcaaagcaaaaaggaaaaccattagcttggcctagctagtcctgccaaaagcatttgatgctttagaaagataagtcatgtatccctagatttatatatcaacgacataaataatgaagtttttatgtatattaactaagtgtcaaatgatttttaattcattttaaattttgtaaaaataacttgcattataaacatttttcctctaacggtagattttagaataaatttatttagtcaaaagttattaaagctaaccaagagtgatttgatttgtatattaacgtaagatgatcacttctcaatagttattaaggtaaagtatacaaaaaaannnnnnnnnnnnnnnnnnnnnnnnnnnnnnnnnnnnnnnnnnnnnnnnnnnnnnnnnnnnnnnnnnnnnnnnnnnnnnnnnnnnnnnnnnnnnnnnnnnnnnnnnnnnnnnnnnnnnnnnnnnnnnnnnnnnnnnnnnnnnnnnnnnnnnnnnnnnnnnnnnnnnnnnnnnnnnnnnnnnnnnnnnnnnnnnnnnnnnnnnnnnnnnnnnnnnnnnnnnnnnnnnnnnnnnnnnnnnnnnnnnnnnnnnnnnnnnnnnnnnnnnnnnnnnnnnnnnnnnnnnnnnnnnnnnnnnnnnnnnnnnnnnnnnnnnnnnnnnnnnnnnnnnnnnnnnnnnnnnnnnnnnnnnnnnnnnnnnnnnnnnnnnnnnnnnnnnnnnnnnnnnnnnnnnnnnnnnnnnnnnnnnnnnnnnnnnnnnnnnnnnnnnnnnnnnnnnnnnnnnnnnnnnnnnnnnnnnnnnnnnnnnnnnnnnnnnnnnnnnnnnnnnnnnnnnnnnnnnnnnnnnnnnnnnnnnnnnnnnnnnnnnnnnnnnnnnnnnnnnnnnnnnnnnnnnnnnnnnnnnnnnnnnnnnnnnnnnnnnnnnnnnnnnnnnnnnnnnnnnnnnnnnnnnnnnnnnnnnnnnnnnnnnnnnnnnnnnnnnnnnnnnnnnnnnnnnnnnnnnnnnnnnnnnnnnnnnnnnnnnnnnnnnnnnnnnnnnnnnnnnnnnnnnnnnnnnnnnnnnnnnnnnnnnnnnnnnnnnnnnnnnnnnnnnnnnnnnnnnnnnnnnnnnnnnnnnnnnnnnnnnnnnnnnnnnnnnnnnnnnnnnnnnnnnnnnnnnnnnnnnnnnnnnnnnnnnnnnnnnnnnnnnnnnnnnnnnnnnnnnnnnnnnnnnnnnnnnnnnnnnnnnnnnnnnnnnnnnnnnnnnnnnnnnnnnnnnnnnnnnnnnnnnnnnnnnnnnnnnnnnnnnnnnnnnnnnnnnnnnnnnnnnnnnnnnaaaaaaaaaaaaaaaaaaaaaacagcagtttctaattgaagagacaaaactgtcactctatatatacacgaaactcacgctaatcagagagaagaatcatattaaaaacacaaaaaataagaaaaaaaaatatttataaattgaacgacaaaactgtcactttgtacatgaacgaatcccacctcaactcagtagcatgatacaaaaatctacttgctttggagtggtcgtttaaactaatgagtagacgacgaattaaaatccaattggcattttaatatataaatatttaattaatcattatcaacaaaatatttaattgtttatgatatactttttaaaaaatattattatattaaataattgtgctaaataaaaattgtttaattattattgagtcaatgttatctattttacgtttttaatattttaaaaagttacttttttttttctttctaaacaaacatgctactttagaagtgtttttaaggttctttgtagtaattttgggaaaaaaaattctaaataatcatattcaaatgagttaaaaacagacttttatttaaaaagttttttttatgattgtaactaaacacgtacgtattagtactggtataatataaaaacttctgaaagataaatctttttttataaataattttttaagcacaaactaatcactcaaatatgtaactgttactgactcaaataagcaaccattaatactattctgtaacacatatcaccacttcaaaaattacctctcgaatagtgtgtattttgtccgatatgaggtaagaggggacaataatcctttattaaagctaactatcctcagtttttcagctgttttattttattaatttggtgtgtaaggaagtctatacttcatgtggattttaattgtttttcatctaaaaacaaactcaatgtaaatacaaataaacagaagtccttatcattacaaggaaaaactataggctcatgtccaatatgttatatgtgacttatttcaatgcacaattatagttttataaacaattaaaacggtgctaattaataatattttaacagtgcagctctattaatggcaaggcaaaaagaaaaggaaagacaacatgcaatgcgcaggttggaaaagatggggaagttatgggagtccatatgaatatgacaaaggtggctggctgggtcaataaatggtgaattaaaatatcttctatagttcaagctcagaatagtagaaaaacaatatcacctaaagcataaagctaaggttaaatattgaatacaatgggaccacctcctttttgtagtggacgcaaaatgaccattaaggtattcctattttatttttattattattattattaataaacaaaaataaaatacatttttatgaaagaaaatttagaccacttgaattcattatgatcataacaaatctaaagactcaactaatacttataaaagtatttacacattatctatactagtaacatataatatctgagagattagttaggacaaactatttaaaaataaataaatctaacttataaaaaagagaaagtggttcaaataggcaaaaataagagatataaattattaatttttaagacaaataatcatgattttattaaaatacaaagatatattttgtttactcttatattaggttaagaggttaaatacataaaattagaaaagtaaaatataaaattttaagaaaaatacatgtaaaattgttaaaatgaaaaggtatatttatccaaatttaaagaaattaaaacctctgttattagtaacaaaaatcaaacgcactcattattacttggaaataaatacttataccacatatttatgctcaagtggagactttacagtggagtgggaccatgctgagaatttatgaagataaaagatggataaaattatcagccacgatttgattttattagttgtttcacgttttgtgtagcagcatgccttatggttgagtagcttagctggtgggtcttggaaggtaaagtagtgattgcttttcttgtctatgatgtttggtttggtcattttaacaacatcttctcacagtcacagagacagagagacagacacaacagacacgttcacactaataacataactgataattagccccttatcagttaaagctaaacagaacctcaaattcgacaaaagacgtggttcatgccttcatgttatctgactttcttcgacccctctctttctttctctctcttctattcttctttcccataacataactctctctctctctgtgatcttatctccttttaattattcactcacccctttacactggttgatgcaaaaaaacatggtaccctctattgttggttgttgctgatactcttcatagtcacaaagtaggtgactagcagtagcatgtgagcgaaggagcctgcagttttttttatcgtactatactatgtttgttatgtaagtgcctcttgttcacccatctcatcacctaaagatttgtttttggctatgcactttcttttgattcttccatgcattttgagccattccttctgctgctttttttttttccttcactcttctttttttgtttcacttttgtttaattattgtgctacttttccttttattgggttttggagtttcatggagctccactttggcttgcaagaaattaaaagttcatgttgaggattttgtgtcttttgttttgtggtaatttgaaaccgtttttgagatggttaattatagtattgtcagcttagtgacgaaagagaaggattaagcctgctagttgtgtatcaaaatttagatctatgatttaaggagcaacggaaagcctctgatttgatgtttaaagcatctgttttctgtaatttgtattgtttagtgatttttgtaactcttaattccctactgtttttcaccttcttttctcctataaccattctagaccataattaattaccttctttagtttttgagtgtctgtaatcttttaattacctgtttgatttccatatgatttggagctgcttttgggtggttagttagtctactataagaaagctatctttttagtgagtatatcatgtcaattgatgagacatgttgtaattatgtggttaatctctggatataatttacttctatgaaagcacggaagagataaaattttcagatttatggagataaccccatctgattaatccgtaacttctgttaaacctatcttatataaacaatacatttttcaatcttaattttatcattgagcaactgctggaaacttcttgaaatgacccttttcatctcaatataatttgaaaaatataatctgcttttgtcagcaaataaagggtttatgtctgtaaaatctggcatggtactctaccttaagactcgtgatttgagaaggacaattctgcaatttactaatgatgaaggacaaaatagttgtagttcacaacaaccgacaataccaaaggctacttttatgcttttgcttaatttagtgcatcatagatgcaacttaaattagcaacaaaggggaaaaacatgaagtgggaatctacagtgtctggaagcaatggagtgtactgtgctatgatcaactaaatagcccttgaagttgtcttattcacgcacttaaataaataaaaatggtgctcaacatcaacagactagacagattctactaattagaaaaagatatgaaatgcattacataataatactcatttaagtatatgataaggaacataacgtacaccttgcattcaaggctcgtgtgtgataaggtccataaggtacattttgcatttaagtcttgttttatacaacatatgcttcttttctgttgtacgcaatgaagaaaacaaaaagataagaaaaaattatgaaaacatttttgctacattgttgtcatgaaaaggttaaaaattatgaaataaaaaagtcattataattcttcataggtggaatctgattgtgtattcccccaacccctcaatttgcttacattttttaaattgccttgtcgtagatgcatgaattaacatctggattcatttaaggaccctgttttttaggggaagaaccaaattttgtttgttgtaacttaagtttcaaattccctagcaagaaaggttactgctaatatgatagtttgaaggtcatttcctctttttggtaaatataatataatttttacccaagcataattattgcctttccttaagcagtttaggtgagtatttgtgttcatgctggttttagatcaaagttattttttcagaaataagttttcagtagaaagtgttatctaaattggttttccatagagaattaaactacatccgatttattttttatcgacaaatgctactttgttagttgttagtttttgttaatgtttagttggcctgcaacagtggcctacaacattagtggacaggagagaacaattaactagcatgagtaactgataagtggtgagtttcttgagttagtgtgttcaaccaactaatggtgattgttagttagtagcacagtacgtgggtaaggtggcaatgcatagtattcttgatgtttttctgtaaaatagggtctgcaacaagaagcaattatatttgtctgcaaagtgcttctttttatttattggataaattcctttgaccagaactccagaagtttccttagacagttacttctggtgaaataaatgtgttcttacactcagctttcatttttattagtgtttggcctagacaagtttctgtatgtaaggtgaggtattacaacagtagaagggataagtcataagttaaagaggtttaaaatagaaggcagattcaatttggaagaaaatcttgaaatggaacaattcatcacctggtgtgtcagaggctatcaggttaaaacaaatgaaattaaaaagcaaatgagttaatctagtattgcaatacatcggatagttagtttctttataatagtatcacatgtaatacgatttccatcttttgactttctttaatagaggtaacggccctctttaatttatgaagaactggttggtaagcagaaacgatcatctatcaaagatggttcatgtcagctataagaagtataagcttgtgtatgcttgtaatccttaagaagaattctttaggtttagtctttcctatttgaccttcattcgccaatgtttgtttctattacttctatatatattacatgtcttctccttattctcatatcctagtatttttctatatttacttcccaagtcccgtttctcgtattgttatatcctcttgtgcaaacaagcgttgttcttttctgctataagtttgctgtttcatatattgttatatcctctggtagtctggttcataacgaagaaacatacttaggtttgtcctctgggaattcttttagaataaaagtaataaagtattcagcattaaccaaatgttttggattcaaagggactgtgtgaacaactgtataactgacatttagaaaaatacatgtggtaggattgttttatggtttgaatttctattctcttatgctttattcactttctatcatccatgatttttaagtctatgaaaacggataattgttagataacaaaaaatttggcaactttttttttttggtgagatgttgttcagagaagcactacggtaagtgaaactgttacatgtgactgtgataatggtttctcttttcattctaaatcatttctttgagatgttcatgcttcatacaccgagcatgcatcttgatgaaattcaaatatgccaattattactttgttctgttttgctcaaggtttgagctatgataactctgtattctctctgtttaaagcacttgagtaacatgactcgcattatgttgaccatgtaaacatctcaaaatgtatctgatttccttagtcttgtggaaggaatgttccatagaattatcatcagtaatatagaaatcctaacatctttttatgttcctgcaatgttatttttttattttattgatataagactagtgtatatgttttgctccacatgatggatttccatgcagttacttctcatgtatatgattcaattggaaatggtctgatctactttaattgcatattactgccaacttcatgttgatgcttgaatttgttccattttgcatggttaatcaaaattcccaactttacgtagcaaatagtgtatttaatcaaaatgtaggtaatgatatcatgttaagctgactaaagtcacagatttgttctatcactgccttcagggaaagaagttaactcatagcaggttcacacaaacatgatgactccaaacttgaacttggaacctgaaaatcattcagaaggcagcagccaagtggcttcaaatgtatcctttcatgaagcatctcatgatcttacaaagggaagcaccaccacttcctcctgtctcacaaaggatgaaaccgatccaggttctattacccttgacttgacactcaactttagttccggtgatggcgagttgaaaggctcaagtgatgctagcagtgaagtcggagctgaaactcctgcttcagcatcagcaactccaagggttttttcttgtaactactgcaggaggaaattctatagctctcaggcattaggtggtcatcaaaatgctcacaaaagggagaggacaatcgctaagcgtgcaatgcgaatggggatgttcactgagaggtatacaagcttggcatctctacctcttcatggttcacctttcaggtctcttggccttgaagctcattctgcaattcaccaaagacacgtgccgtcctccatgacagcactgagggctcctgaaatgagagctgctgcaaaatttgagagaaaccaatttggatcactgattttcgtggaagatgatgatgttggattcttttggcctggcagtttcagacaggtagaccaacaaggagctggtgttaatgtaggacatgctcaaagttcaaatgctagtttaattccaatggtgcctcctccaccacaagcttctacatctcctgatctcacattgaagctttaagtttaaggcttaagaatgatgatacatacacaagcaaaggcctcacaaagtaataaataagtggctaagaattgactcatccattgctttgcattcaggcaaaattttctcaaccactcattttcattgtgaggggtttaattatcagagtttttatgtgtgtatgtatcacttctcttgagattttttagtctttgatttcattctcttcagacatgaacttattaattaatagggcgtgcattgtacagtgagatgtgtatttccaatggcgattttaatggtttcctctcatgtattttacttcattatacatgaatcatgatactgcgttcaggataatggactaatgttttatatctaaaaaatgtgtttgtgatgcactgtttgacggaaacatgaggtatggatgtgattcaattagcaataattggtggatttttcttacaggagttcgaatctaaatggaaattcctatgattaaggtcatgttgtcacatgttcaagtgcggaattgatttctcaactcacctcgttaaaaactaaaaagattgtagtttatagagattgtatgtaaataacattttctagtttgtcacataatcctctggggacatcatatttaagcgaaatatagaagaataaaatctccaaggtgataactaatagtaacagctttttaattaagcaccccaaaaaggaatcaggtaagtcgtataaattctacctttaaaaagtagatttaaggaatataaagctttgaaagcaagcacatatattcatgcagtggtaaacaatcgtgaacgttatattacaactacgaatatatttttttcgtctatgttgacttttaagtgttatgttttgtttcttcggcttgaagttgttgtgaagtcattccaattgaaagtgagcatcttaagcatcattttgatataaagtttcgtaagaaaccaagttaaattaatgtatttctgattacgttctttagttagaccttactttattgtggacccttaaagcccagtggatcagctacaatatattgtgtagtatatatatttaagagttgggaaaaactttatacacccatattaatacaccattccaacttttttaaatggccaaagtaccctcgtgaatccgcaagtaagtttttttttttaatttaaaaaatatttctccaaataatgacttcatgttattaacacgacacttcaaccaactgagctaataggtcaattgtgctaaaagtcaattaatgttgatacatataacattaaaatttttaatatatatttaatacacgtataagtttacataataaattttgtaacaattaattttgatataataattaaagtattttttacatataaaaatcatagatttaaataaaaatcataagttcaataaaaatttgcaggtttaataaagtataaatatagatataatttttaatttaacctataaatacaaatataatttttattagacatgcaaatttttattaaaattatgattttttttaaaactatgatttttatatgtaaaaaaaatactttaattattatatcaaaattaattattacaaaatttactatgtaaacttatacgtgtattaaatatacattaaaaaatttagtgttacatgtataacattaattggtttttagcataattggtctattagctcagttggttggagcgtcacgttaataacgtgaagttctcaaatttgagacctgcatgtgctattattttaaattatttggaaaaatatattttaactttaaaaaaaaaacttacttacggattgggtaatctgtatggcccatacggattgtccaatccatatatctcaaaaaaaaatacggatcataataaaagtgaggatatttttggaaatgcattgttcagaatcgtgtattagtgggtgtataaagtttttcccttaagagttacatgtgattttttcttttggtcaacttgcacatgagtttactggtgtaaaagtagggaagaagatgggcttaaagactagtggatcagctacagtaaaacccagatggagcttaaacaattgggccttgacccttatttggttcctttttttctcatttttctaaaattacggaatcaactatggaacacaaaatataacataaaagtcaattgaattaacacgattgattgaaagataataggagcacagagaagagaagagaggaagggtttaaaaaataaacttagagcatctccaaacaggaatcttcactttaattcttaaattactttcttggaacccacattaccgcatcagctttcagaattttgttaacattttgcttcaaccatgaaccttcacttcatatcagtggtttttccggtatcctcacatagctgttactcgatatctttataaatgcactttaagtggttagattagtaatgttattatggccttaagataagaccagggctttgacccttgctactttagagaactcgattgagaaatgggcaaaggcttgatcaatgacctagcactaagtaggcatacgaccaagaggatacataactctcaacctcaagcacgaaggctagaggaaagtcatacctgagcaggtacaatcaagtgactacacaatccttgagactcaaacttaaagacacaaaggataaaagaaagtttttttacctaattagtgtacaatgagaaaaatacacaacttctaacctcaaatacagaggcacaaaaagactaaaggaaaaccacattgatcaatgtacaatcaagagagtacaattttgtattatacaaatacgacattaagtacaaatatatctttaaaatacatactcacttttcttgctgttatacttcttttcacttttatcaatctaaaacaccttcaaaatctattcattctcttttgtctcttacttctttctattctgttttttcctatcaaaatctttaattgttcagacgaaacattaactcatcctaaacagatacctcaatagaagaaaaaaaatctaaaataaaaagaatagaacgccataggttgggtgtgtcctttattcataggccggaaataggggccgttgctgttgacatatacttgatcctgaattggactggacctctgggactgggtcatggatgaggtgtattgaacctagtatatgcttcattatttgaaatgccttggtcaaatatgccaatgcattaatgtaagaattttatgtttattaattaatcaaaatgaaatgttcgaaggtagaaagaattgtataattataatcgaaaaataaattgtataattagatcaaattaaaattcatttgattttgaaggaaatgaaaacattcacgaaatctatttattcaccttttaccctctttcatttacatttttctttcctaattaagaaaagtgtagttatatactctgtcaaacttattatactattcagtaaaaaaaaacttattattctattaattaaataaataaagatttaaatatatataattttcaaagtagctatggaaaatgttgacttactactcacaatatttacttctgttttgacttgatttgattactcttttttcttgtgtacatataattggttaccactgtatatatatttggatcttcacttggagtattttaggagttatattctttcttagtaagtcatatttcatatacaatgagtatttgcttttacttgttatttattttattttatttctttcaaacactattgcttaaatttattttcagtttttaattttgaatcttaatatactatataaattaaatcttgagattatgataacattaaggaatcttaatttcagtttggtttttaaattttgatagataatatatcttgattcgatgatctattttaataatttccttttcaattttagaagtctcatttatttaatttattattatataataaaataaaatatttattattaaagtaaaacatcgattattttttattttttatttatatattttattttaattaaaaatgcttatacagtattcggtaaacttgctagctataaaatagataaataaagttgctattcaatgtacaaattgacctctataatatcatgtctgattaattgtgacaaaataattattattatttgaagagaaaagtcttaagtatcctctttcaactttcaaaaaacaaaaaatcgtcttttgacctgtatacatttacccattacaaaatttggaaggaaaatgaggagagaaaaaaaaaagggggacattgactttttgtttgaggtatattaaggctttgtttgggagttaggaggggaggggaaggaaagagattcaaggggaagggaggggaaggaaagggaggaaaataagggaagttcctttatccttgtttgggagttaaaaatatatcaagagagggaaatagagagttaataagaaatttttacaattttttcattatttaaaaaattaatacattatatattttacactggttatggtagggtagtaattttattaacactgatgatataagataataattttagttatttttccttctaaaaaccccccaaataggggggacaacaatttataagctttggaggatttcagaggagttttgaaaatcctcaaatcctttccctcaaaaattaaaactcgcaaacaagggaatgactctccctaaacctttcctttccctcccttcccctcctaactccctctcccaaacataccctaaatgaatcgccgtgtcgtatatttatggggaatttattgtcttattattttcccatttggatccatccatccacctgagtttgcataccaaaagtaacacagcgttggccaacatttgacttttttgaaacgaaaggaagcaacgtcccattttccgttcatttgtgaaataactcatacaccttcaatttggatttgtatcgcagcagtgtcaatatctaatataatagtcatgcattaatcataaaattattttatgaggttaattaattacaatctattgtgttaaattcttatacagtaaagaaccttctaactgcttggacggtcaatcgaacagttccactaccgaatgttcatagtggagtccatctcaggtcactaactgctatacttataaatggagagtagataaatgcagtcacaccctcaaatacatcttttatcacattttttttcattgattgacctcattttattttttaatgagttatttgtacaatgattgaggttataacattttataattttttattttattatttttattaagaagaagataaaattaaattattattcaatattagactaattaacacttaaaattcttagtgacttagacattagaatctcttttagagagatatctaaatatataacatctcacttagatttggagtggacattagatatagaatcaagggatagacttaacaaacacnnnnnnnnnnatattccaatgactacactgcagcttctttgtcttactcttattcccaccctttctctcacaatccaagctgttcactcacccgcaattcaactgataattttgattactcagtgagcaaagatgaccaaatttggaactgtggagagggcactaatggctctgtgcatagtaggttcaagcccattggagatgggttggttggtttatccaaccatggtggtgctgctggtggtattagttcctttatgcaaggtaataatagtcagtataaaactaatagttcagataaccattcttttttcccttcagagttgcctgcaaggccaaggtttgaggctcagtcaggggactcaagggggaggaattctgagaatctgagaatcttggaaggcttggatgatgggaaggtaaggaaaatttctaagccagagagaattgttagggaaattgtttcagagtctatacctgtcatggcattgacaattcaggagcttaccgatgatgtcatagcatcaactaaggaatacttgaggaatctcattgagaagcctgagaagaaagaggaactggtaagcctccagaaccggctcgagagaagatctgaccttactaaggagagtctttcaaagtgccataaagtgcaattagaggttttagtggctgtaaagacggggcttgctagcttcctatctaataaaattcaattgtctgagatggtagaggttttcttgtttaagaggtgtaggaatgtaacctgcaagcatttgnnnnnnnnnngtgttgtccacttgtataaatattttaatttctttttattattagaattgagatttagttatatttgacattaatatagatagattattttttcttatgttagaataagatgaagtaatcagaaaatgggttgatttggtggggaggagaattacacctcctatttatataaaaaaaaaatagatttaaatatgtttttggtttatgtaagttaacattttttatattttattatctgtaagtttattttttgaaaattttagtccatataattttactttttttcatttttgactaatgaaagatatttttcttatttttagtttttataagtttatacttttcaaaatttaaatttctataaataaaaacttaaaactattgatgaaaaaattagaatattaaaaagaattattttttaaaaaaaatacaagaagtaaaaaaaattaccgaaatcaatattgaaaaatagtctcacaaaaactaaaagtaaaaaattaaacttacagaaataaaaaataaataacggtaacttagagacacaaaaacacctttatgccaaaagaatattttgtcctaataataatgagtgaagtaaacgaataatggtaatatgatgcaaccggcaaagaagttaaaaaggcaatggatgaggtttgtattgaagtggtcgttcattcactcactcactcgtgcttggtggtggtgaggtggctgagctgcgcggagctgtttgatagggaaaagtaaagttgcagtcaaataaaagaggtccacttgagcgtaattctctccgctttcaagggttaagactgtaatctcacacatccagaaaaaagcatgccctttatcgccgttttttattacaccccttcagtgtgaacacttgaataatgacattccggccgttgcttgcagactatcccaaactaaaaccaacgttcccaacgtaacaaacaaaagaaaaaacctctggttctccctttattctcttgccatgattagaagtaaagattgtgttgctgactctgaaggtgagaactccaggagcaagctctcaaggcacaattttgaggccaacaaggagtacccagatgaaaaaggtgttgaatttctgagagattcagaagtgggtggtggtggtgttgatggggttcttcactcaaaacccaccaaggttgttgttggtggtggtggcagcagctcagggttgcaagagttgaccctcagctacctttgtgacttcccaaaattcaatcttgctgagaaagagattcctggtaaaagcctgctgaattccttggaaaaaatgaaccacaaaggaaaagaggttctggtctgtgagaattcaaatcaagatgggaaatgggtggaaagagattttctcagcctgagtgagccaagggaagattcttcaaagagatcccttgaggaagttgttgagacggagactaatagggagaagaagccaaaactggagacacttaacctttctcttgctttgcctgatgtgtcactttcccttactgcctcaaacgccttgcaaaacggtgatcaacaacaacaaccaattaggaccaaaccttgcaggccatccactactactcacacttcatattccaatgactacactgcagcttctttgtcttactcttattcccaccctttctctcacaatccaagctgttcactcacccgcaattcaactgataattttgattactcagtgagcaaagatgaccaaatttggaactgtggagagggcactaatggctctgtgcatagtaggttcaagcccattggagatgggttggttggtttatccaaccatggtggtgctgctggtggtattagttcctttatgcaaggtaataatagtcagtataaaactaatagttcagataaccattcttttttcccttcagagttgcctgcaaggccaaggtttgaggctcagtcaggggactcaagggggaggaattctgagaatctgagaatcttggaaggcttggatgatgggaaggtaaggaaaatttctaagccagagagaattgttagggaaattgtttcagagtctatacctgtcatggcattgacaattcaggagcttaccgatgatgtcatagcatcaactaaggaatacttgaggaatctcattgagaagcctgagaagaaagaggaactggtaagcctccagaaccggctcgagagaagatctgaccttactaaggagagtctttcaaagtgccataaagtgcaattagaggttttagtggctgtaaagacggggcttgctagcttcctatctaataaaattcaattgtctgagatggtagaggttttcttgtttaagaggtgtaggaatgtaacctgcaagcatttgcttcctgttgatgattgtgactgcaagatttgctcaggaaacaagggcttttgcagttcttgcatgtgtcctgtctgtttgaactttgattgtgcaagcaacacttgtagttggattggatgtgatgtttgttcacattggtgccatgctacttgtggtattcagaagaatcttatcaagcctgggcctagcttgaaggggccttcagggacctcagagatgctttttcattgtattggctgtggacatgcctcggaaatgtttggttttgttaaggacgtgtttgtgtgttgtgcaaaggattggggtcttgaaaccttgatgaaagagcttgactgtgtaaggaagatcttcaggggaagtgaagatcgcaaagggaaggaattgcatgctaagactgatgacatgctattaaagcttcaaactaaaatgatatctcctttggatgcctgcaattacatcatgcagttcttcagctgtaagtgtctggactgtggtcttttcaattcatatttaaatttgtgttaattttttttaaaaagtatatatttacttcataaatacggcatttaagtgctaaggatacaatcatagatacagcatttaagtgctatggatgcactatgaatacatcatgatatgcttggtctaaacaagaagaaaggatcagtccattatcttcaatgggattgagttaagaaaaacacttgatatgttagtctttcagctcttaatactgtatattctagtgttacagttagatgaaagcattttcatatgatataaagggtctctttgtagtacgattatttattggaagtgagcaaaatcagtggcttttttatgtgatttggtaggatgtgaataagggaggaacaaatatatgctctggtggagagaaggattactgttgataaattatattgtgcttctgacagacaagagatacagtatggcacatatcaataaaatgagaagctcaattatgctctttttataaattatggaactttgaaccccatttcgacttgaccaacaaataattatgctccttagtgtctggctgtccaaggccaaaaagtagaataacattgagaatagccaacctcagttttccttttctggcaacatttttttatttgaagcaggaaattcagggcaagttgagaaatgatttgtactttaagaatgcaaattgaaaaccattgaagttaatgttttaaaatggattataagcaggtttgcttttcattttttaagcccaaaaaggaaaattaggccaaaatctcctctctcttgaacattttgattataagttttttaaaaaacaaaagctaatcctagcattcattatatgggggatttgaatatcattttataaagtgattcgagactgctggatgttttatcaacatcaagttgttctttgtcaatcaatcaggcttgcttatttaccacaaccaattcactttcactattcagcttggatatttacccccaccccaggcctgttatttcctgtgtagttttttagtgagcacatgctactggcatttgatgcccctaacagatccaggaatcatcttgtagtttttaaggcagtcgagctcagtattacatttgataaagtttaatatgtttttatgatagattgaaaacataaaggaagaggaatgttgcttttcacactgaactgcctatgcatcaattagttatggtcttctgatgctcaatttgcatggataatgaattatgtgtttgatgaaactatttgcatctttttcccttcctggttaagatattttcatcttagcattggcattttgcactgaagtacttcatgagataggaagcaatggaatgccattagttcttgagaattgcagtggtgggtgaaactggaaaaatgtgtataaaactgttgcttgtatggtacggttgccattatctctttggctttgttgaatatgtttgatgtaataattcaaactacctgtgaccctgtgatttttttatcaaatgtccttttgtatagaaggcccttttccttctttagcttagttattgctaatgtttttttgatgaaggcatgttttctctaattaaattactgacaatgatatctaactgttgagagattttttctgataaacagacgcggacagcatgtcagactttcatacttctggtatttcttcaaaggatttgccagcctctcaatctaaccttacaaaggatacaccatctctttcaaaacctatttctctattaccaaaatatggttatgacatgggctattctaggtcacatcctgatgccatgtcaagtgatctacttcagaaagacctcaaatcttccatcttaagtgaactgaaaaatgaggctgatttacatttgggggctttattaaggaaaggtggacttgaaagtttggagagcattgtgaggataaaggaggcagaagccagaatgttccaaaccaaggcagatgaagcaagaagagaggcagaagggttccagaggatgatcaggacgaaaactgcgcagatggaagaagagtacgccgaaaagctttccaaactctgcttgcacgagactgaggaaacgcagaggaagaaattggatgaactgaaagtcttggaaaattcctattttgattactataaaatgaaaaaaagaatgcaagatgagattgatggtttgttgcggagaatggaggcaaccaagcagcaatgggtttaaattttatttttgttgcttttccttatgttttcttattgaggatactgctaaatgtgtaatttattgatatgtgatgtcttggtattctggtggttccctgaatggatggttttcaattgataaaatcaagctttttggtgtctcatctttgtttctttttccttcataaatggagatggcacaaatgtcaagctggacatgttaggtgtgaaagctttgcacttcctgtcgctgtttatattacgactttgaggctataaaacctgtaaattttttcgttatcacatcattgttgcacatagatttgcatcttcctttattataacattttccctttaagaaattgaatccttttctccattttatatacttagcatctatctgtatgtttagatcatattatttttaaaaaacaatttctgtcccaaaaaacaatttattttttattaaattttaagagaattgagataaaacaattttaagtaggtcttaagcataccactgagtgccttgattaactggtggggttattttagtttagtaagtgatttcgagttctaaactttatatccaattgtgttaaatatttttttaaaaaatttacagcctatactaattacccctaattccagtaagcttatcctttgctaaggatacatgtgatttcgaagagagaaaaagaagtttttctcaagcatgttactattatacaaagatcctccaataagtaggagagagaaagcttgacattattaattttgttactcttggtggatgcagcataaaggaggacagtgctcaagagcactttgcttgaatattatttgggttattcgtttatttgctcaccgttgattgctgcttcttaaaccataatttgcaactgtttgtgcttatgctgtgttttgccacttccagcattggaactagttccaccaaggtgataatgaaagggaatctgcacacattcatattagtgtgtgacatccaaccaatcagctctaattggattccattcgatttattattatatactaccatcattttatttcctgatcactaagctggttgtgtaatggtgactttcagcaaacattatcaatttgctattatattaaggtagaatcgaattttcatcatgcttgaggaataatgaaatcattatactctctaataccgtttttataaactactagtataatttaatataacgcttaataacaacttacatcaaagttcagaaaaaagaacttacatctcaaattgaaattggacaactaacaagttagatagttgagttaattaactatttgattaatattcgacttctagtaatttaagattcgatttctgattgaatgtataaaaaaatattatatccattttgataatcaatctctgtctttaaaagactaatttatcctgggactggaagtacatataaaaaaatatcaaagttgaatcaattgataaaaagacattataataattatatgttgacaatcttaaaagtcacttagagagaaaaactatctctacaatgtttggatatttaataccttccaatattctttcagccaatgggaagcaaatcctggagcatgcctacaacagtaaagaggtatgtataatcagtgatctatttctgcggaataggttattgaaagcgtatggatgcagaattcaagactggtactacgagggacttgcatatccatatgttgacgatgcgtcctgatatttgtatattctagatatcttcacgatggatcttgtgagaatgacagtaagtggtgtagtattgtaagggtcttgttaatcagtaacattgattaaaaaaataaaaatgaaaaatatttattgtttaaattagagtataaaaaaaattatgaataattcaatttcttatctcttaataaaaacatttctattataaatttcttgaatgttatctttagtacactggttagcatttgcttaattgtaaaggtttgtatctttttatatgctattccgtggtatataataagattctgaaagcttgtgagctatctgttaaagatgtggaattctagggttgtctgtattctgttggtagtctactcagtgaatatcttaagcactgggagacaatagtatataacatggcacttctggtgcttttttatcaatatataaatatacctttgcttattaaaaaaataaacataatgaaattaaatgaaaagacagaagaaaaaagaattgnnnnnnnnnnnnnnnnnnnnnnnnnnngacttaacaaacacttggtgagaataatatatatatatatatatatatatatataatggattaagttatttcaaaaaacactttaatagaattattttcaattcccaatattttttaaatctaatgattttaacgaataattattctttattgttagatttcaaaaaataaaatgtaaggatgaaaagtatcttttttaagattattcatgcaataacttaatctctatcttaagtaaccatgagtatatttaagtctatttttttatcatataattgatataaaatgtttactagttttatttgtgaccatttttatcaagaaacctggttagtcacttttagtaaaatcttttttttttaatcatttttttcattaacaaaacttaaactaaaatcttttcttannnnnnnnnngttgtctgtattctgttggtagtctactcagtgaatatcttaagcactgggagacaatagtatgtaacatggcacttctggtgcttttttatcaatatataaatatacctttgcttattaaaagtataaacataatgaaattaaatgaaaagacagaagaaaaaagaattgaaagtataatttatattaattatcttagtacgatgttagatgataaaatgatgataatgacaatgatagtggaagactaggaggagaagataaagaatttataatgattaattaaattataaataaaaatagatattttgtcttttgagtatttgataattaagacaaatgaaatattgtatgatttattctgtgacaaaaaatggaactgttatcctgcccatctttatctaatttgcaatatttcatttttttaaaattaaatattatattgtttagtacgacaagttttagcaaaacaaagttaattgtgtcattcttaaaatttcgtggagccatgacgaaaaaataatttggatcattttatatttaagtatttcaaaatataaatatatattaaaaaatagatacatgattttattagaatttatatattttcttatattaaacaaataacataactttaataaatctctaaataatatattatatttttattcaatttactctagctattatcatctaatatcattcaatatatttataaaataattatataacataaatatctatatataaggtagacatcacaatgacataagataggataggtttaataaggatcaaatttgtctagtttgagtcttcaaatcaattcaaaccaatttaatcataatcaaactatcatatctattattaaaataatgaaaaaatgaagaaaaaaaatagaaaagtgattatgatatcatgcaattttatacatttaactcaatctattttttatttactagtctaatatgaaacatatgttaaatttcaagctaaaagttaagtcatgtcttacattataggacctgcatgggttgggcttatagcaaaagttcttagagtgtttcttcctgcaccattcattttttctactacaccattgatgaacagtgcatttccaaaattgtccttcgtgtttttgcaacttttatacacggatccgtatgattcatgcttacggattcgtcaatccgtaagattcttacggatccgtgaatccgtaagaatcttacgaatttgtcaatccgtaagtttttttttttgcatgtacggattgggcaatccgtaagcccaatccgtttgtttttttttttgaaaagttaaaatatattttagaaaataatggtgcaagcaagtatcaaacttgtaacctttaagttattaatatgatgctctaaccaactgagttaatagaccaattatgtcaaaaattaattgatattgatatatatatatatatcactaaatttatttaatttaaaataatttattatgttaaaaaaatattgtattaaatatacattgaaaattttagtgttatattagcaacattaattattttttaatgtaattgagctattaatttatagtttaatttattatgttaaattttataataacattatatgttaaaattacatgttgaattaatgcatgcagacatatctgtaaattatatgtaaaatttatattataatttacatatctgtgaaattatttaatgatatgaaataaattgttagcttcaaataaggataaaaaacattaaaaaatgtttaagaattaaaagtgaaatttacaaaaagtgtagaaataaaaaaatatattaaaaaannnnnnnnnnnnnnnnnaatgtatatttaatacaatatatttctaacataataaattattttaaattaaataaatttagtgatatatatatatatcaatatcaattaattttttacataattggtctattagctcagttggttagagcatgatattaataacttaaaggtcactagttcgatacctgcttgctttttttagtatgaaaacaaaccagctcaattagtcaacttatatcccacaagagtccaaaagatagtaagaaaaaaaattacacaaggcatttccagcaaataaaaacacaattaaaaaataaaaataaaaaaaaatgtagaaatgctggaccaatcgaatttgaataaagtacatggaagtggagaaaattaaatcaagagtaatttcgggcataacgggccaaacccactgacatatctacaaagactccaaacaagagaatagcaagacccgtgaagttgattaaatgagattctctctggtgtggggagggttttaacatagtatacttctccatcaaccctgttagtgcagcacaaattgccatgaaaaatagtgctctaccacctgctacgtgccatggggccattgcattccttgattgtgcagatccttgaagcataaaccccagtcccataagccactgcacccaacaatcacgacccaattattaaagttttgacatatatgacctatattactgagtaaattatctctaaggttttgtcaaatttgttctgatgtcttttgtttttgtaccctcacacagtcacactagtttttcttaattatttaaaaacattacacatgacacttcgtattaattattcaaaaaatagtattacatagtgtacctctataaaaagaatgttgtaaatattaaagaagcatgaaactatatacaatctccataagtttcagagagtgtcaatataatttactcaatacttttagattgtcactacagttaaaatcatatataggcgttcattattgttaggatcatgtacataaaatgttttttctaaaataaattaaacttttgtttttcatataaaacaaacttgtgcacttaattttaatagaagttttcttatctaattttgttaaaagttgagacgcagatgttgatttatgaaaaattcaatttattttatttttacttttattttttctcccgtgagtactcacaaaaaaagtttaagattgtatagactaatacctgcaagccaaccaagcaaaaggtgccaatgccaatccatgaatggaggctggttacgtcctcccagtttaccatatcattgaacttgaaaacggcacatataccaacaatcccaagaattatagcaatgaaatgaagtgtcaagtgaatgatcttctttgtttctcgtggccctggcaccgtttggtatgacagtattgctgctcaaattttacacaccaacctaattaattaatcactgtagaaaatgatacgctatacacttttgtgtatatatgtatgtatcacacattaagttgttcacatcttgttcagatcagtccaaccataaataagatctaaaataaatcttaaaagattttttttaaataaaagagttatagattaaatgtttttattaatatatgtgacttttttttaacatatgtgattttttcttaatttataaaaattaatagtaattttttttattagtagacttaaaacttaaattttaattactttatttggatcgatccaaacaattaatattggtgaattaagtcgtgaaggaaaacaaatatgctaaactgggataacaatgatgaattgaatgcagtatagaagggacatgatgtgagagtaagataccttgaccaataaggaaaatgaatccaacgaacatcataaaagggtgaacctgcaaggtggaaaaagactcagatatgaagtagaatatgatttttgtatataaacacaagcaagaaacacaagaaaatagtgttaattacattgaaaacacgaagtggattttcagaatcatattcaatgccctcacgataatgcagcaaccaaacaagcaagaggatgagagcaagaagcccaaacaagtgtgccaaaattgtggtaccgtataaagtcatcttaatggattaggtgggagataagatgagagaaaatttggaagctaggagtaatagagtgagtgaaattttgttatagtacaatgctggttctgacatggtgttattctgctgtggttcagtcttatagagtttaccttttgataaagttcacaaaagaaggaattgcttgatatcttggttttggaattttgaatgaagaaacttttggcataagccaactctagcagtttctaaagtatatattcgtatgttagaatggtttccaatttttgtctactatttgtataatctttttgcatagggattgatgcccacggtgtcagagactcagagtattatacactacaaaccacgtgtaaatgaaattattttctgtgtaaatgcaacttttgaactcacatgatataaacatttgaataccaaactattttcgtcttattaaataattttctaagagttgtgattaaaaaattaatagtaataaagttttgattaaaaatcttgttagaggtgcattaaaattataataaaggtattttaataatatttttagtcatttttttaatttgttaaccaatattctttattctctaattaacacttatcatgtatttttagtgtacatatatcagagatgtttcaaatgacaacatctcttataatgataaatgagaacaatcaatgacaacctttagattacaattgaaaattttaatgaaagagattaaaataattaaacacgtgactttctcttcttcctcttctttctccacttcacagttcacaagttctaaattctaccacattcaacgcctctttagatattgcagatatagtgctctcaattctagcacgttaattgaatgtttgtggatcaacatgttaagttcttttgttttttttcttcaaatattgtcattacacaacgcacattcagattcagaggttgggctgttacaattgccttttaccagttccaagataaatcataaaaagttttgtaaaaaaaaaaaaagataaatcataaaaagtagtagagacgaacaaggaaatcaacttaagaggtaacaataaggaatgacttgaacgaggaatctacccatacatatgaggtaactaagtgcttctttatcttcaagagaaataaaattggttttaaatcattcgaatatgattgagatgtctgtttaaattaatctcaataataattttatattgaaacatgttcattatatggaaaaaatatttttgatataaaattaacactcccgtaatttgattcagatttaaatatatgctagaattaaattgatcttgaatacgattttttaaaaaaaaaacttaccccgtcatatatcttacaataattaatcaagttgtgcatgaccggctcaacttatatctaaacttcaaagtgaattttaggcataaatctcatttttttctattatatttgacaattattttattttcttatattaagttttaaaagtttatctttcttattttaaaaaatgttaattttgattaaaaacgttagagttttgtttatttttacattttaaaatgatttaatatctttttttattcattatgtttcgcatatatttcactttgatacattatgttttaaaattatcattatgatactttactttttcaaaatgtatggtctttttttcaatttttgttagaaatttagtgtctatcaatattttaaaattttagaataattaacttaacatagtggcaggtaatatgtcactatcttttttatttaaaattaaaaatcactaaataaattgaagaaaaaagaaggatttgcaaccacgaacaactacaataacaaccttcactcttatattattattagtattattctcttcattcaatttaataatttaataacgacaataatttcattcaacaattattctcaatcacaatgggttatgaccctttcttcttttgttatttcacctctcaccgttgacccaaaacgatcattgtctcgccctcacttttgtctcatcatcgtttctaacaacaacgcgttgataaaggcaaataagaagatcgacaacgcccgattgtggatggggtttgactagtcgggcctttcataaacatcttccaatgaaactcattgttcgacccttctttgtgttgcatatcttgcctgactcggttgtagatgtcggatggaaaacttctctacttgcccgggcttgctcatagacctcacaaagagtcacattgtgacttccaagttcaaatctgggttaattggctagttaaggtcatgtttttgtctttcgtcgaagataactcttgctcttatctctcctacttctgttttcaatagcataactctgtgaaaggttttggttttcgatgaaaagtataagaattttttgtggttccagcgagattacatgttgacgttgttcaatctatatggtgatgcattttttaccttttcaaatctagaagaaattggaggagatgatacttatttttggttgtttattttttaaaaaataaagatagtgattgtttttagccgccgctatgtaaaattaattatattaaaatgcttatatcatttttttttcattatatcttgtagttatttcgctttggtacattaaattttaaaaatttcattttgatcttttatgtttcgaaacgtatcattttgaacatttttaaaaatttaaaaattaatagaacactagtgtttttaacgggatattaaaaatgatcaaaatgatacatttcaaaagcataaaagacaaaatgaatcttttaaaatttaatgtactaaaacaaaataattgcaaaatataataagccaaaaatgacattaagcctaaattctaagatataaagatataattttttaactaatttaaataatttattaaaattattgttattttgcttgaattttcttataaaaattaagatacaaatttacttagtaattattgtattcaattttattttatgtttattttttaattaataataaatcgatttacttaatcttattaaagctttattattttaagtaatatttattaaaaaaaataaaactgtatttatattgaaacggagataaattttgacaatgtttcataagtaatatatacataataagtatttaatttttatatgacaggagtgtctggcaagacatgcaattggggggcttataagtttagtcgactacttaagagagagaaaaataaaagaaaataaaaatatttatttaacatagtagtataatgaagttttttttaaagaaaatatttgtttttaacataatatatatgttaattaagattattttttttatttctgtctgagcggaccatgaagttgtgaattgtgatattttgttatcaaaagacattgcgaggctaactttaaggccgagaaataatgattagataaagttataaagtccacttaaaaccacaaaacatgaaaataaataattttgaaagtttcgaaggattttactattattattgaaattaatttaaatagacatcatatatatatatttcaaatttgtaaaaaaaaaattaatttcattatcaatttattagtgttaatagggtaatcgatttacatacaactttacatcaaacaatgtaaatatgtatgtgaactgtgaactgccccacaatcagacaaagggcaagcttttacaggcacaaggaatcaaagaaaaagagaaagctagtgagcaaggtaaagaaaagaatggggatccaagatgcaacctcccatttttaatgcagccagccctagttttttcttctttcgatgattccaatgcaacagaagttcaagtgtctccatctgtacacaagaaatagaaatttacattttttttcttcttaaaactttaagtagcaattactttttgagtgattagcaagtttgtgtttgtgtgtatggaagagtattcatatgattgggctgttgagttgggttgtgaaacctcttcgtcaagggatgcgctacatatatcatataaatttttaatacatcatttatgaatagtgcatttctaaaaaatatgatgttctaatcaattgagctaatagaccaattatgttaaaaattaattaatattgatatatatatatcactaaatttatttaatttaaaataatttaatatgttaaaaatatatgtgtattaaatatatattaaaaaatttagtattatatatatcaacattaattattttttaacataattgagctattaatttatagtttaaattatatgttaaaaaatactttaaactataatttaatagctcaattatgttaaaaaataattaatattgatacatataacactaaattttttaatgtatatttaatacatatatattttaacataataaattattttaaattaaataaatttagtgatatatatatcaatattaatcaatttttaacataattggtctattagttcatttggttagaacatcgtgttaataacttaaaggtcacaaattcgatacatataaaaaaaaactcttacaaattggagaatccgtaaaattcttacggatttgtcaatccgtaagtgtgaataatacggatccgtgtataaaaaaatgcaaaaaagcgaaggataattttggaaatgcactgttcataaatgatatattagaaatttatatggtgtatgtagcgcatccccttcatcaattgggctatttgggtccggcccaagttgccttaatcagtagtgcactttgtttgctcagatcagggacaccaaagtattaggcctttttcataaggcttcattcagacattcactactttcggctttacaaagtaacataattatgatcaacagataatacaacaataagaaaactatatatccaacaatcatgtacaatcacacttatttaatacagatattttctggcagtggaaaatcctacaatgaatgtaatattttacttttaaaaaaaattcttaacaatgaatttttttccgctaatattgtataaaatttaaaagaaatcaatttcagaaaaatacaaaaagggcatgcaaacattgcagggatggctggacccagaatgcatgtagttttaaagctctttttctttgttggctcttattttgcataaatattgttgcctttgtcttcgatcctagatttccttcttctttttcttttatatcatgggaatgccaaataaaattatgagaagcgtatacaatatgctagctgcttgtcagatgaacataaatactctggtcgagacattttgcttaatctactgacatttgctctaatatactagctttcgatctagtaataattatcttctatagttctgtgccatactctatagacattagacatgagatgtttttttttttaaatataaatgatatagaattctgtttctaggttagtttagtagtacttgatcttggaatggtttgttacaatacataaacttgtagtccacgttaatatattcgtatttaatatggatgcaatatatattttatttagatttttcagctttgcaatataaaattgtgtgtacgtggacaacctcttaactgccacagattttgaagtaagtgaccaaatctcaacacggttaccgcattgtttacacaaacattaattagtggcagcttatgacgtttctcattgaatggatatctatcaatcatttcagttggcaaaagaaaaaggaaccaagagggttactaaattatactagcatatactatgaattattatttgggaatttttaagaataaatgtgtagaattgcataagttttttactaggttacctaattatggactgtttgtaaaagtacttttcaagattttctattggaaatataaaaaaaattttaataaaaaattctcaaaaacacttgtaatcttgtatctaaacaaattctataaattataatatataattttttataataataacttaaaaattaaattaaacatgaatttaatagattgacaatgtaaaaacttacactaaccatacatatttactaaactctgtttttagatactaaaaaaatagtactggacaaatataatataccataattcacaaattaccaaattctttaaatatgttttcagtggtttagtccttagatctatctatatacaagaataaatatgggaagaagttaacttcttaaataaaccttagtatttcaagagattacttattatctttttaacagaaaattttttgggaaaaaaaactgtctactagagaatactctgggttccaaaaaaatacaagtaaacatcttttcaataagagtggaaataattaataatatatgaaattattgaaataccttaaaaatatttaactatctaattaatatgctgggtgaaaaaatcggaggttacttatttttcatactttaatatgaataaaaacagatacatgagtgagaattgtgttctggtgtcagtcataatttcatatacgtcaacatacaccatatcaacctcaatgtcacttttgatttgtgctttttcgtcgaaagagctagggttcaatgctagcttcagtctcatgccaaacttgagagggttaaatgatactgatctcattatcaaactcttgtgacagttgtgagaaaacaatgtactacacattcccaccactcaattaatatggatgacttcaaattcatgaatatatataaaggtgagtgatactttaataatgtaaaatgtaaacatattttcacaaatattgagttatccaaaaatgacatacaaccacaacacatccctactatccttcaaacccgcatctataacagaacatttctcgttcgcatttagaaaaaaggtttttagttaaaccccctttggtcaatcggccagtgtagattattatcattatatgaattataaatgaacctgactgctgataccatatggaaggctttgtactaaaagaattaaataattaacttaaataaaacaaggtgaataattaaaattataaggtgacatagtaaaaagggcacaaggaactataattttactgttagttttgtatgaatcgtatacaattaacaaattaatacaagtatatatcttgaaactaattttcccgagcctcctatgcttgacatatatataacgtgtggagattacaatagagtacaaatttgtctacgtacgcatgcaatggataagacgaactttgcttttagatggacccagcccaatcaaggtatacataatatgcaaatatagacaacaacatattagtgatcgtacatacattccccaccaaagcacaacaacatcattcttcttaattctagccctaccaagggaaccttctcaattctaagagattattttttcccaaaccgccccatctgtctgcatccttgactagaaaaccacccattaattatcttgtactactaccattttacatattgagctccatccacatgtagaaccaatcatttaacttgggatttaagcaaggaatagagtaccacaaactacaatgcatatgatggcttgcaaaagagagaatagggagagctgacctggcgtatgagttggagttatcttatatgttagggtgtgtcaggaataaatgatgtgtaatgagggagggcctacagtagcattcctgaaaaactaccccaccatgaatgcacccacgttgtagagagattgttacctccttttcggcctcattgttatttgttaagtatgattgaatctcatcacaaatgtgcatgatcagatactactctatcttttcttctataacaatgatatcaagagggataattaaagatcatatacacaagtcaagaaaagagaaaaagcctcgcatagtaatattgattaataaaagataagaaaataatgtatatagtgggttgttatactaactattgagcactaacaacacgtaattaaacaaaccaaattgtttatatatatgagaaatttagagagttctaaagttgatttcgaactcaaaaaaccctaacgattctcttatgtgtgatctaattaaagaggtcacaccctatttattgaatgtgattagacctacatgtctaaggcttacttgttataagaagtccttaataggttgatgcacatacattctgcttaagtgttgagcccgaaagacataagtgtttgttatgtttgaccaatttatccaaataattgacagtatctctcaagtcttgagtttaaaagatgtaagtatttgctatgatcagttaatctgaatagtccacatgcttcatcttctactaagattttttttttattgtcttttgttgctcccccaaaagttgcgttactttggtttgcaaggtattttataataaactcacaactaaagatcgttgtttttgtcttgtagtaaattttttgatcgactcttcactaaaaacaatctacttaacataaagatttcatttcaaaattcatatgttttttgtgccttcttaacactagtgttaaaacaacaaatcatttaattttacatgctcatttccatatatatggtattaggaaaaaaaaatatgctttgttatgaaaggtttttatgactctatcaagatgagtaaattctcactttcggtcacattttggtgttaagaaatataaggactacaaaaatattttggacactcttatagtaatatatgatgtattctttatgattgtcttaacaattggttatgaatttatgctaaatttaaaaatgttataacgggttattatagtaaaagaattttttttacctcaaatttttaggcatcgttagcatcatctcatatgaagtattgtctgatttgatatttggtgatacattatggttttgttattagtaaaaaggtgccttagtggattaaggggggagaatatttataaattatagttgatttcgattactaaatgatgtgagactttagacatatcaaaataagtctttaattgatactaagggacaagagtgatttaggtgtttcttttagtgtcaatggtttaatcttaaatcctcaagtattgttatgatcatctcgtctgacataatattcacttccatacttgatgttacgtcggtttcatattttctaaaaggaagttcaatatgttaagggaggagataatttataaattatctttgaccctcacctcttaaataatgtggaacttttaaatgaacaattttgtttacctattcattacatatattataaaaattaactttttcttccgtgttaatgtgcatgcaacttattaaattttttttatcaaatattattgttattatgggtaggactatctcttgtattccatagtcaatacattttgttttataaaaaaaaaatgtagattgattaccaactgcatgaattattaataaccgagactagaattatatattttgttttcaaaattgaacccctgaccggcagtttcacctgtatgcctaagaaccaacatggtgatcaatgattaactctaaaagatcgtacaaatttagaattggtgaaaatcggtaaaaaaaaaaaaaaannnnnnnnnntattgtattttattaatatttttataatatatttaatttataattttatgtgtgctttgaatattaagaatctacaatttaatttttttataaatattaagaatctaaaaatgatattttattttaatttttaatgttaaaaaattataacattatatttatttaatattattttatgcattaattaattattaatattttcattaatactattttaatcacaaatcaaaattgttaaatcttaaactaatgtctttatgttggttgaattttaaagttactgacatttttaatatgctttttattgcacaaacagcactggcggcggcataagcttataagttataacctttgactttaaccagtgcaccgaaaggtacatgctctcttttttacttttttatatataaaatgatttccattccagtataaaataaaaaaaaaaaataaaacactacttgaattatactactttataaccttgtcactaatttcagaatttgttagctttatgctgcgtactcgcacattctctttctcaataccaaaaactgtcaggggcactacagttatatttcagttgatataatttttcatttaatgaaaaaaaaaattattaatacaatttatgtggatatacactgaacattgaaaatatatattagtttttatttcaacaaaattatttattaatattaatttataatagtgaaaatatatattaattttatatcatcatactaatattaatattttattttaattccataaaaactatatcaaattaccaagattaattcaatatttagtatgacaattattttataatgcttcttcagtaacaaagcttgggggatcatgttcagtgcagtgcataaagctaactttattttggttacataaacaacatcactatatcgatcaaaagactcaaaacaaacagattgacgtagtaagcattatatgatagaaataatgagatctaatcatgtgaatgacgcggtgtataagatctgattgttgggaagtggaacgcaattatatttttttataatttgcaattatttaagatgcacatggaccatttagcttattcatgcatgtttgcttctaatggacgattctaaataaacatgtagttcttgattatgcttttaatttacgaaaaccaatttattatccaaatgattggaaagatagaatcattttctctatctatttatttatttaattgcttctttaaaaaatctatttatttaaattgaatttttgttattgtatatctatttatttttaggttaaattataattttgaccctttataatttttaattcatgattttatttttcttttcgtaattttaatttaatcctatttttttatatttttttgttttgattcaaatgaatcatagatctaaaatattaatttaagataccatataaaattatttaattaattaaaatataaaatatataataaatnnnnnnnnnnnnnnnnnnnnnnnnnnnnnnnnnnnnnnnnnnnnnnnnnnnnnnnnnnnnnnnnnnnnnnnnnnnnnnnnnnnnnnnnnnnnnnnnnnnnnnnnnnnnnnnnnnnnnnnnnnnnnnnnnnnnnnnnnnnnnnnnnngatgtaatggtgaactaacttaatgatcaaaattatttattttgacaaataaaaggactaaatgttttgatttaaaaataagaagactaaaatgacttatttaaaattatagaaaaccaaaattataatttagtttatattttaaaataatctctaattataaattattaatatattcgctttaaaaaatgagtgtagattagcaaatttcaaaaatatttagtaacttacatctatttatttatttttaattacaatacgttatcatatcataaatgtatttaagattatttgtaattataacttacttacacattatgaataattaaaaaaacatgagggtatgctaactaatatataacaaatgttcaaagagttgttaaaagcggaccattaccgagatattaagtaaacctcatgactatcttgtattggtcttgtaaagaaaagtaaggaaaaatgaagaatatgttttgactaaaccgaccttaacatgctggtccttagaatgtcccctttgctttgacttacaaaggaaaattccattgatgtagttcaaaggattttttttgacaaaatctcgtgtaactgttcatttacaatggaattcaaacgttgattttagataatttttccaccatttcatacaatggaagggaaaaaaataagttccttgaatcaatagttatttttagacatgctagcttattttgttccttccactgaagcaaggaattgcatacgaatgcttgccaaatgtacgaagactacaacttaaactaaaagaaacactcatcgtaagataagatattcgaggaagaagaaagaaagtatcaaattgatgaactgtatgagaaatagtttcagaaacgcacataagatattaaatattatattttggctcaatataattaaaatatttaattttaaatttttgttaaggaggcagagtagtagatcaattctgatgtgcgggggggctggccagtggccacaaatgacatatgaaatggataaacctgatatttattatttatttatttatagatttttcttgagtggatgggaataaatgaaattaatatatccaaaacaaaaccacaaatataatacctgaaaaaagaataaagatgccgcgatccgcgagagtgacctgatgacgtggcggatatgtgtggtgaagcagtgacgcgtgttgacgaaagtcactgttggaccccatcccctgatttatgggtcatccctaaggcaaacataccctttattgttcttttgtttggctttatcttcaccagctgagacttctgcatgcacaatcttgtaaaaggacaaaactaccccttccccattattgctattactgttgtgtcctactccctcttcatcacggtccggcaacttgcttgcttgcttgcaactaatctgtccgtgaccctcgcttttaatagatagtacttttttcaattgtttttaattgtaatagtacaaataatgcatgttcatgctgttcatttgttgtactacccactcgataactgtgttcctaacacaccctaagtttaagacaaaaatcttaatttgattttgcacaaaatatatttttaaagagaaatcagaacttaatcttaaatgtaattaaatctcaaattaattattaaattttatagtctatttaaaaaaatcaaaatttatgagattctttagaatttcattaaagaataaaaaaaatgcttaattttatgattataaaaaaatgtgttcttgtagttggatttaataaaagagactaattctttcaaatacattgaactgagatttaaattttaattaaaagagaggtgtaatatttagtctctgatataattttctttgaagaagtatagctgtataaaaaaatgtgcataaggtaatattgatgtttcaatttaattgataaattttagtttaaatttgaataagtaattattctaaatattcaaaagaaaatacttcatcataataatattctaacttgattagaattagcatctcttaatgtgttctgtgttctgcataaaaataatgtcaataataatgttgttttattttgtttttatttttctaacggtccaaatttcatcaattggagactaaagagaatatttccgagatacacgccattgttaataagtcaatcatatcaatgggcaaaagaatctaaatgattttttttctaaattatttataaatttgaaattattttcaaattatttatgaatatgaggcttttgacaaactatttacaaatatgggacagtgggtcgtgtccaaaattgggcgtgaccgaggcgcgacccaccagatatcgatacgtgttatgatagatggagtgatgcgcatataaattttggacggtcataacttttgattgggatgtccgattgagacgaaattggtggtcacacgctcgaaattaagaggagaagccctaagcaagttcctaaaggggacttggccaaaaattttccccaaaagaggcctctaaatgcctcaaaattgcgatttaatctttgaagccctaaaaaatttcttgttttctaattttttatctattcaattagtgaattgtaagctattctttatttatctaattacttctcttaatttcgagcattttaacataaaatacgtctccatcggacattgctacgagaaattatgactgttcaaagttatatgcatcatcaattttacagtataattttgttcaagagtcatggccacaagggttactctgagagctttgaacagtcataatttctcgtagcaatgtccgatggagatgtattttatgtcaaaatgctcaaaattaagagaagtaattagataaataaagaatagcttgtaattcactaattgaatagataaaaaaaattagaaaacaagaaattttttggggcttcaaagattaaatcgcaattttgaggcacttagaggcctcttttggggaaaatttttggccaagtctcctttaggaacttgtctagggcttctcctctcaatttcgagcatgtggccaccagtttcgtctcaatcgaacatcccaatcaaaagttatgactgttcgaagtttatatgcgcatcgctctatctgtcatgacaagtgtcgccatctagtgggtcgcgtccaaaattgggcgtgatcggtatgcccaaattcaggcgggaccagtcacgcccaattttgggcgcgacccactgtcccatattcgtaaatagtttataaacaaccccaaattcataattttttatttaatttgtatttttttgatttttttcccaatttctgcaacaattcacctcacatgcatagataattcaattagcattggtggacgtttgatgtgatataaaattaaaaatatttttttaagatattaaatatatttattttagtataatattttccatatgaaaataaaagctattccaacattctaaagaccaaaagtattgattaaattcctagaaaaagtatggattgaaatataaaattgattctattataaacatttactattattcatagagttttacgatagtttttaagaaaatatatttattactaggacacataaaataataaaattattaaaaatacttgtttttacaaaaaaacacttgttaataggacacaaaaataataaaaacacggggaaaaattaagtcaaaataatgataaattattaagataataattaatattattatcttacaatattagagatataaaataaaaaaatatatattgctaagaaaagttatgtgtacatctattaaagaataataaatacaattatagtaggagtatattgaggaaaaaataaagagaaaaaactcattttcgattcattacttaggaagctatttgatatttacgcaataattttttttactataaaaaacggagaaaaagaataatatatatatatatatatacgtatatactttttatttgacaattaaaattataacttttaattgaaataattaatctctctggttaaaattattttttgagttcacaattggattttatatttcttattaattccttttatatttattatataattatttctattttttgttatagtaaaatataattaaatagaaaataagtaatgtcatttgaaaatatcaagtgaatagaggtaatcttttttccttccaatcaaaccgaaataaccagagaagattggaatcagaagatgaacggccaagattgatgacccttgagatttccaccaaaattcacgtgcatgccatccacccaatacagcatcatgcagcttgggaaccagtgagtgaagatccccatgtcactggaagcggcgttcgctccccgtgcagtttagataatttgcgtctgcatggtctaaaatacgcccggcggaatcgcggagacgacaccgttcggaagtgggctccttacccacgaagcgcgagtttcccaatggacagaaaaggacaactttttagtcttaccataccaaatagtactaataaaaaagaaaaaggagcaataaaatgttgaatcttatcaagggtctttagaatattaattaaatttttaaaaaatttcaaaatttataagagcataaaaaattaaaaataatataataattttatgtattttaataaaaaaattaatttttaattaatatttttagaatacttatgcgtaattatctaaaatatttatttatgttcgttcctacgcgtgaattaggatgggtcccactccggtttgcagggtaacggcgttgtgaagggacgttatgaagagaatggaaaagagagagttagattagactccgtgaataacggggacgcagcttggattgcgggaatggaagtggatggtggggtccaacatgggtaacggctatttgggtgatgacctggactagaggagacagcatgtatcgtaagctgtcaagcaccaagttgcaacttgcccttcaagttccacggagattgatggacgtgtatattctgaaaactaggcaaaccaaacacaatactaaaaaaagtaaaatggaaagaaatataaataatgaaatacatttagttgtaagagactgattttaatgatcatgaaaataaaaagttgatccagcttataaaaattaaacttatatcctataaaataagtttaaattttattgttgatgaaaggattatgttgatacataatttataaatatttttataggctcaataaattttaagacatattcttctcgttaagttttaaaacttaattggtaaatattatgtcttcttatttaatttttttattttattttattgtgatgtttatcttattaatatgttttaattattaattaacataatttagtatattttaagaagtcattaatttcataatttataattattcttattgaaaaggtaaaacataattataatttcatttaagaattttagtgatactaataaatgaaaaatattattatggcaaattatctgtacattcttaaatttttaaagtgacaaatatttttaaattgtttttaaaaaatattttgaaacaaattaaaacatggaaagagatacataatataagatggatagatgataaagtaaacagagttcaattttaatagtgtcaacataaaaaaaactttactctattacttaattagaaattattataaacatgatttttacaataattatgatacaaatatgtatattgtttcaaaagaaatattttgttaaatataattagacattaatataaacatatatcttatttaaaaatgaattattggttcattttcttgcatgcaataacttaataattgaactaatcaagtagtaatgattaaaaatttataaatttgtgaagacgctacttacttaatattccttaatttggtaataaaatataataagaggacgtaaaattattttgatcatcaacttcatagtccataaaatctaatgcttagatgagctaaggttatgcttaactgacatgtatatgaatcatacgttttgattgggtggcgcgtcaaattcgccgccaaggaaaattgatagtcacgtggcgagctcactgaggcgccgaattttgaacgttggcccacgcaattctcattccttcggagccttcaactttttcttccatttaatgccctccctatcattcctattcacgcatttgccacgggtcattaatgtctttctactttgaattcaactgtgacacgcttggtgacaagacctcagggtcggttctgattgcctcatccagagtgcacccacatgccctaattccaaatttacccttataaaggtactaccacgtctctttttttggttgaatgaaagaaaagtagaaaaaatgaaaaatttaaaatttgaattataaagaaaatgataataaagaaaaattaattttttatatctataaaaataattttttcttctatttttttaaacaagcaaaaataaatattttattaatagtattttctgtcttttctatttttttctttcactttctttcttattaaactaaccattaaaaaaaatatataaaattatattgatataattttgataattattatattatttttataatttgatatagaatattattttaattgatcaaattattaaattatatattattaagattatttatgttaaattttattataattaaataactataaaaataattaaatgatctattttaaaatatttattttgtgtcgatttaaatttataaaaatgatataataaataattttaaatcaaataaaattttatatatatgatctgtatgaaaataatttttaatccaacaataaatttttaaaaatattatttaattaaaaattataaaataatataataattattaaaattatattattataattttaatcattctatttctttaaatatactaagaattaaaaaaatgtaatgtataaagttgttatcctttttgagagccaaaagcttgtagaatattattattttctctataatcattcgtatagctctgctgtcctctacttcatttgttcctttttagtacttttgtattattattgtcatgggttttgccactttatcccacccccaagccttcaaattttgaattccaagcttttagtagttttttttattttaaagcatcataaatcacattcaccgatgttctaattaatattttttctaaaagaattctttggaggggcttaaatacaagggtattcatccgttcaatgaattatgaaaatagtagttggttcaaattttgaaaaaaaataaaattgaaaagtaaaatgattattatacttaatattttacttcaactagcatgttattttaaccacttgcataaaaaagctagttttattaaacaaagaattgagtatgttactagacagaagacaaatataaacttgannnnnnnnnnnnnnnnnnnnnnnnnnnnnnnnnnnnnnnnnnnnnnnnnnnnnnnnnnnnnnnnnnnnnnnnnnnnnnnnttttaagttatatagaaatatatatttaacgaagattaaaaataggtataaattgtttaccaattattatttttttttcttataaaatatataatctagtcatttatattcaatagcatatctacatggaggataatgggagcaattgttcccacaaagtaattttttttacttaaatatattgaataaatatttttttactcctataaataaatagatattgttcccataaaataatttttataataagatgaatgtaaatagttataaaagataaaaaaaaagaataaattgatactaattttattcactttatccttttaaattttactatttttaattttttattatcattatttttaatgaagcttatataatttttgtttgagaaaatattagactatttttgcctccactaatttttttttggattcgtcattgtttatataatttataatatttattatnnnnnnnnnnnnnnnnnnnnnnnnnnnnnnnnnnnnnnnnnnnnnnngtacatttcatatattttctctacaaacaacaaaacaatttttttcttattcatctcaaattactttctcttatatctatctttaaacacactttatcttcttaaatacgtgtctctctcaatttatcctcttttatatcaactttatattgaattttaataatgtttaaagttaaattatgaataactaaaaatacttatatcacaatttaaatttattcactataagtctataactttaagatgtaattttaaaatacttatttattttaagttttaattatttaaaaatgttccggtgacaaaatgacaggataaaaaatgtttattcagtataattttgattatataaaaaaatattttacataatataaaaagtaaaacattacttacaaacaaatgtacacatggctaactaagaattagttattatcttttctaacatgcatgagccatattactgataaaaaaaaacatgcatgagttaaattaacgtttagtaattaatttgagaaaaatgaaacataaaaaaactgcagaagaagaattttccctgtccagattcattttctgtttcagttcataaatttattttttgcagaatgataaacagggtcaaaagaaatgagcgtggcttaaggcagaaggggacagagaggatatgttaactttagaaacagagccacgtgttgaagcctttgtcaacaagtctttgtactcatcgaaaacaaaccagaaaaataaatcatacagctgagagcttgttgtaaaatttgtaacgtatttctcattttccacatcaatttaatattcatcaatgaaaatgagagtttcaattaagtactacatttctcttaaaggaacgtcaattaaaataaataaacactgtagtatttgtctacatttggacacagctcaacacagtctcacgaatacaaataagcttcgtttggccgtgtctttctctctaaccaagcccttttcgcctcgctctatcgcttctagctgtagagattactattattccaaacctctctctttctctcaccatcacccttttccttcttcttctcttccttgcaccactccttatattatctcataaaaataactcttgggagaaacacaataatcaatcatggaagggtctcacatggggttgttgctcttcttttcttccatgctttttgctgccttcccttctgcctcctccagaaacttgcctattataccctttgatgaaggctacgcgcccttgtttggggacagcaacttggtcatccatagggatggcaaatcggtccatctttcactcgatgagagaacaggttttttattttccttttttttttttttgccatcctttgtttttggtttggcaatctatgtgcagttgtttgttttttgttgagatggcgatttctgtggctaaagtcctcacctttttgttttttttcctttccatttctggggtgtgtttgcaggttcaggatttgtgtcgcatgatctttaccttcacgggtatttcagcgcttctattaagttgccttctgattacactgcaggagttgttgttgccttctatgtgagtatttttgcctcaattcggtgattatatgaaagtgatacccttttttcttatttatgtcccatttttttataaaaaaaactcaatcacccatcgtcatcaccagcatacgtgtttttctgttcaacaaagatttctccttcacctcaatcaccaagctttttttgtctttttataccattttttcctttgtgtgttttaaatcactgctagtatacttcaattaattagtaattttttttgtgatttgattataaatcacatagttatcagttctcactttcatttttaccaatggagaatgaaatttaggatttttcagacatttatcaaaacaaaatttaaggacttcttacttgggcaaaagtgtgcagttttgtttgtttgaaccaaaagggtcattctggttttggtttgaagtcttaagttgcatatccggcaaatgggaaaagagtaattaatttatttcatcacattatctacttgcagatgtcaaatggtgacatgttccagaataaccatgatgaaatcgactttgagtttttggggaacattagaggcaaagactggaggattcagaccaatgtatatggcaatggtagcaccaacattggcagagaggaaagatatggtctctggtttgaccctgcagatggtttccatcagtacactattgtctggacagactctcagatcatgtgagtctctatctacatatactatatttggttctattttgcatgttatacacttgactattgtatctatatcttctctgttatagtaatttttttccatcattcttatttgttatgttactttactattacctcttattctcattttgcatgtcatgtcagtaatttgatagattatattgttttgaatggtgatgttatattcaaaaaatttcctgtagttttcttgttccctttattaaatcccctgtttgatcaaacaacctgtttccccccctcctgtaatggtattttgtattatatgtgatgctttggctacttggttatggataatgaataaaaccagatactaaggtcactaatattttaattttaaatggtatatattcttttagcactcagaataatttgttttctctacctaaattcataaggttgtaaataatatgttccttgcatggatttttgtttttcttattcaattatgctaatttctacttttggatgtcacttgttgcttacttattttcataattgcgttcttgcttatccatgtgcagattttatgtggacaatgttcctattagagaagtgacgagaacagaatctatgggaggagatttcccttctaagccaatgactttgtatgcaacaatatgggatgcatctgattgggctaccaatggaggcaaatacagggttaactacaagtatgcaccctatgttgctgaattctctgaccttgtcctgcacggttgtgcagtggatccaattgagcagcacgtggccacgtgtgacaatgctcaaagctctgaggcaacaattcctccttctggtgttactccagcacaaagaatcaaaatggagaattttaggaagaagcacatgacatactcctactgctatgacaaagtcagatacaaagtccctccttcagagtgtgtcatcagttcccaagaagctgagaggctgaggaggtttgatcccgtcacgttcggtggtggccgccgtcaccatggaaaacgacaccgtcgcagcagaggaagccagacagaaactgctgcttcatcattttaagagggttccataacttccatttagtttcactacctggggtttatattttcttcttttaactttggtgtatagagaggaggggcatagaattcttgaatatgatgatagttttgatatggtggttattgctggtggtggggtatgtgtatagttcatacctttaggttctcccaggtaatttgtttgtcattcatgtcttatggtttacaaattgaatccgttgatttttgtatttagaccacacctctgtttcaataaactatttagcataagttatctatggaatgttaggtatgaattatttcttttaactgctaatcatcatgtatataaaatgttggtgcaaccttttttttattttaaatttctctcgtccacaattgtccaatatacacacacctgtctgatagtttatgtggtcatatttgtcagttagacttggacatgacagttatttaataaatcttaatgagaatccaaggtcaagctgaagaatggaagtgttgctgcaggtcctccacttaattttgaccacagtttatgtcttcactttttttcttcaatgtgttttggtacttttgtaacgttctggtgtattatgatggattgaattgggtagttgagatctctatggaaacattatggctagtttttgttgacttgtgtgtctgttgtgtttaaaaaaaaaaaacatttatttttcactttttaacaattgttcttgggatctctgatctcactgcatcttggtaattactaattgagagatttcacaacaataatttttatcaagtagaaagttaattataatagactgaactatgaaacggaggaaacgagttatgaatttcaagaacatatggtaaattcaatacaagttttttgcgtgcttaggttatcaatgcaggttacttaatgttaagcattttttggccgccaagatatttgatgaaaggtaattaatcgtaaattttttaagaaatttccatgtaactttgtaaatatgattcatcattatcaaatatcaatgttagatatcctagtaaatgataaatttttttcgtacaagtaactgaaaggtgatccactcttcttttgaaagcaattaagataagcgattacacctgtctgtagaatatccaaaaaattcatagcaaggcgattttatctaaggttttccttgaaaagcaacattgctcaattgctttaattagattgattaatactaaagcaaatatcatcccggcatcttgtgtttcaccttgtagacattcttttacgcttttcttaggaagatgagggagaaatttaatgatttacnnnnnnnnnnnnnnnnnnnnnnnnnnnnnnnnnnnnnnnnnnnnnnnnnnnnnnnnnnnnnnnnnnnnnnnnnnnnnnnnnnnnnnnnnnnnnnnnnnnnnnnnnnnnnnnnnnnnnnnnnnnnnnnnnnnnnnntatatatatatatatatatatatatatatatatatatatgcctctcatacatacgggcgtattttcttatctaatcactcaagtaattttttagacttttaaatttgtttttttaatatcttcttatctaatcactcaactatttttttagatatttaaatttgtttattttatactagttttttgacctcttaagtttttttttccttcattattttaatatctaatattatcaagtgacttatgtctattatctaagtttcttttaacatctttggtaaagaccttggacataagaatctttgaatcaatctctaccaaaacatcttcatttaacttgatttcaatgaagatattttcaacttgactctagtcaaaacattcttagcttgacctcaacagggaaatcttgagtccaacctcaacaaacacatccttgatcccgacatcttgacttgacctcaaccatgacatctttggcctagtctcataatgtatgtacatgatttatctacaaaacacttatataccattacataaaaatgaagataaaataattaaagcttaatttgggttgccattggcccatgggaccttgtaggcttttttaagtgattttttttaatcattcacatgaaactgacagctctacctccataataaacataaggctcttgcaagctagtactctaaacgcattggttaaaaaattaaaagagaaaaatatatttgtgtaaattataggagagtataaaaaagatcatgaacaatataattttttattttctaataaaaatattttttctttaaatttcttaatcaatatccttaaaacattcattaatatttacttaagcttaaacaactgaacacccttctaaaaggtattaactcatattagcctcggtaatcgacaaaactcatgttcacttacatgcaagcttggtattatacttttgtaaaaacctcaaatattttttatttgaaataattttgattatgttaggtaaaattattataaacattattttttaaatatttaatgcaattatatatttaaattcaaactaaaaaattaatagaaacagtccaataccaatttatcaatccacttgatttggtagtatttaagtcgtatggatttattatagggagaatccaatagttaccaaaagacgacaaaccgaaccgagattctgaaccgaccattttaattgggacttttttttttttggataaagatttcaattgtgacttgagtgcatgttttgttatctgataaatctaacgttaaattacatagtatattgaatatgaaacataactctgacacaacctaaacatgtctttattaacaccatttaaaagtttcgtaagcagaattttaatgtaacaaaagaaatattttcgtcaaagcattaaaaaatttgaaagacatcattcatatcatacaatgaatagaaaacatgttacttagttctgcatagtcaattccgcgggtaggtatggagtacaagcggatacgatgcaagacaaaagtgacaatcagaattttctctttctttctttctggtatcatgcattactaattactattaattattgcatctcaaattatttttaattaataatgcattctggaaatacactcaattaaatattttcatcaaatcctcatcaaatatcacataagggtttgttattaatttgagcatggaatttattgaaataagccaagaaaaaattattttgataaactactccctctaatcttaaatatataaaaaaaaatccttttcttgatttcaaatattataaaattttaattaactttatcttatttaatactattatataaaatatcattcattaaattaaggtgctagtttcaatgatttttttttattttttatatcaagttttaataaaagataagttgaaaaaataatttttaagtaaaatttatacaattaaatgtgattagttaactttctttaactaacgagacatttttttttatatatttgagacaggagagagtacaccacaaaatttattgaaataattttaaaaatttataagagttattattaaaataagtttccctgtaagtttttttttttgaaagcttaatatatatatatgtgtgtgtgattaattaaatatttaaattacgcatactttaaataaatgaaataaaaagtactactgatttaggagctaataaataattttaatcagaaattatagctcgattatattgataacactttttatgcaagttttttacttttaaaattattcatgatttatcattaattattaaaatgattacaaatgaatgcaatttgtgaaaagtttatagacaagtggagttttaatagttgcaatgaatccatttgtaaaccacaatcctattgtttgccaaccaggtttgaactggaggaggcaaaggcaatagtcaacttccgtcatattcatcccttgagccacatatgactcataattattccagaatcactcatcatatattattgtcactgaaatccttgtgttgccaaatactactactgcatatttccatactgggacgaaatcaaaatctcttcaactactactgccaacctgaaattttatcacggaatcaattccatggcctccacaaagatttggacctttaaacttgtgactataatactcaattctgttctagtgatattgcattgcattcataagtgaagccttcgttcaaagcatattgttataacatgagttaaaacttaaaagaatatctgatttatattttgtttccacccgcctttttaaatagttgcaatcaatccatttctaaatcttttttttttctttcacaatatttccattatttatttatttccccatttttttcgtaattggcttcctaaaagttttgtcctcctaaatatcattcctttgtataagacatcacagtatgacgaatttcctcgtttcaaactgtacagtaaccttttattctctcttgtttttgtagaatttatagacatttcagcttgagttttatttcccagcaggcattagttaatacagtgctatggttgagttagactaaactattcccttgtggcttcgtatacactttcaaagctaaaactatatatcgttcatgtatgtaatgttaattacccaaggccacaatattcttattattctacaatgaaccacaagcttcctctcattctataagcttatggacaatgccttgccttcgttttttatttgttatataatgctattgggatgaaattgtactccatgtaattttgaaagaccagtgaaactaaagtgataattgattacagtaatgtgtaaaattaagaattttagataaaggcaggctaaaaaaaatgaatgagcttcaaatcatgtggagtaactctttacagctagctaggactgtttcagactttcaggtgagtatttcatttaatgtgatcttaattaaaccaccaaagtaaagaaacttcctattctttttatttttttaacccaaagcacatgatattaagagttcaacctatatacactaacaagtagcaggggaattaaggaggacaagataaaaagggttggaaagatctgaaataaaaaaagcctattaattgcacaaagcgtgacttacctgaaaaggtttaacagatggtggatatgcaaccttaccccctagtgcaaagaaagtttctgtgatttgaatttttcacctctaggtccaaatacttgccctctggggaaaaaagggtctattaactataagaataatttatttccaggaagagatttaatttgacaaaacaggtaaccgaataggttgatctagggggaattacactagtaagagttatttaggcttacgaatgtaagctctttgaaaacttatttcaataaatttcacagttaaacttaaaatcgatcaagctctaatgtgataatattgaataccacttaataaagttgtttgccaaaatgtgttccgtctagaaaatttactggcaagtaccagaagttatacagagaataagctactttattaggctagctgacaaaaatacttcgggttaatttttatatatagatagagaatggacaggaaaatcttgacttatacagtcaaatacaccatttatcaagaatgaacctgaatgaacctgattacactatttccctcaatttactggtaaggacaatgaatttttttctagctacattccaaataaatagcatgatgataatttatcctctcctatattattgacaccacaccatttttggtaagttaagccattatatgtatggttcaaactgataaattaatcatcaagtaacaatactcagctaatttattctttgtaggaggatattcttttatgttcgatttatgtattgaaatctaaaacatcccatcattcagttcaagatatgttgtacactatgctgatacaaatagtagaatattatagttgatgtataagatgttggttgatcttagtgcacaataagacaattagtggagcagcctccaggaactacaagaaggtacctgtagatgcctatatttctggtgttataatataagaacatcctctacccaagctgttacgtctagctaggctcttgttcttcgtcaggaaatgtctccttttcaatgacaaggctgtaaggcaagaaaggactgaaaatgacatcgagacaatgaggccaaacaatgtcagaactaaggaatagcatagactgaagagaatgtagtagctgaataaataaccaacaaccaattctatgacaacatatctaaaaattacaagcaacaaatattatcataatacaaacctcaaataagaccatacttttgataatattaatccagcaaataatccatcttctccattctcatcataatacaccaaacaatttttttccatgcatgacatcaaaaggagaatgtaagggtcgacccaacagaaaatgaggccgaaaaattgataaaggttaaaatgcaggatatgcttgctgctgaaaaatgaaacccaagtttccacctgtgagaaaccacaataaaccataatagaaacagggtagaagagagaaaaatagggaaagaaattaggcaattgaaaactgattattgattcaactaaaccacagagtcagtagtgatgctagctagtcacacagccaactcagtattatgatttatgacaattgtctaccgttgtatatatcaccagtctgaactagtaaaaatatgttgaattggccttcagttcagttgaatctgaatgaccacagtccgcagagacatggattcgggttggaagtatactgtaaagcagaaaactagtaatagtgtgtttgttttaggtgaatccttgtgtctccttgaattcacgttcatcgtggttcaacagattcgtataagctatgtaactgattaactttctaactcctaggttgataaactaaccatgataaactaacgatgacaagagagaatgacatactttttttttatctacaaatgttagttgtcacaatgttaattttgttagcagagagaatcgaataagtgacctttttttcccttccttctttcttaaccattcaattcaccttatattttcagaataacatactctaacacaccagtaaaatgtaatgatgaacaacacacaaatatatcaagaaaatattacactcaacttatatgcaccaaatatatcaatggctaaaaggcttagctaaatcctagagggatcacctccaaaagttgccaatgcacttcaatcccatgcacacaccaaacatattaacaaaggtatatttggcccaagttccacaaccgtttgcaatggcctgtgtacgggtcattgcaaagactattctaatatttataagtaaaacacaaaattttggatttatattgtttaaggaaagatagtgattaaaatgaaaaggatataatgattactttttcgaaaattttcttttagaaaacaaagaacacaaagacaatgaaatttatagttaacctttattatgagagagtgagaatagaggccaatcataatcatgaaaagttcagattaaaaaatagtcacgcaaatttcttaagtggtcatgtaatcattaaataacttttaatcttatctataaattcatatttactctttttagcctctcatacaaatgctcttgtcatttgatgtgtcacacacacagtcatataattgtagtgaagctattaagatttgggagaaggaattctatgattgaattgagtaattgactgagttcataatacatgcatggctcatgtacgtatatatacagatacaactctcgtagtgtaaggcaattgaatcaagctggtgtaactaattctgaccatagagaaactaatggttaacaacaacaccattattcatttcccaataccccgcacaagcttaagggtatattttttaacacgctcaacttagcaaggaaatgtgcaaagaaagagtgaagggtccaatctaatggcttagtgatgaagttggccagttgattgctagagaagaataaaaacaaacttggactaaagtttctccacaatgtgacagtctttgtcaatatgtttagtctattcttgaaaattagaattagaagcaataaacgccttactgattgactaccacagtaaaaaaaaaaaatagcaaaaatgaaggagacatgaagattgtgcagtcaaccagtaactgatcatgcattatttattttgaatttttcgggttgcgttcgggtcacgattatatgatatgatcagtcctggcgtcctgcacagaatatgttgaatgagaaatcttacatcgtttaagaagactttaactaagattttaattaggttgttatatttaagtgatgtggtcatgtgggtatgttagttgtaaacggtattgattttaacacatgacttgttaggtgtacctaattctaattggtcacgtttcataaaattgaatcatgacaattttataatagaatatgaataatagaggtattggtttagatcagttttgagccaaaaagtctttggatcaaaagattaaaaaaaattgtgatttgattcagtttggattgctttcttaaaataaaataataacaaaaaaaaactgatctaatcctataaaatgttgcttagattaattggatgatgatttggtttttcctggtacatctttaccggcaatttaatttcctattattagatgtctttagctttactaattgttaaattttatagcatgatcacagttacattttatatttaaagtttctaactcaagtatgtgatcctaaaatgtctgccttgtttcatttaaatcatctatacttgttcataaacttaaatcaacgtgtaatactatgagcagtaatagaaagatgaatgttcgcaattctctttttgatattctttttttaacatttttttattaactgaaatttattaaaaattatcaattgttgatgaatctaacttttcattnnnnnnnnnnnnnnnnnnnnnnnnnnnnnnnnnnnnnnnnnnnnnnnnnnnnnnnnnnnnnnnnnnnnnnnnnnnnnnnnnnnnnnnnnnnnnnnnnnnnnnnnnnnnnnnnnnnnnnnnnnnnnnnnnnnnnnnnnnnnnnnnnnnnnnnnnnnnnnnnnnnnnnnnnnnnnnnnnnnnnnnnnnnnnnnnnnnnnnnnnnnnnnnnnnnnnnnnnnnnnnnnnnnnnnnnnnnnnnnnnnnnnnnnnnnnnnnnnnnnnnnnnnnnnnnnnnnnnnnnnnnnnnnnnnnnnnnnnnnnnnnnnnnnnnnnnnnnnnnnnnnnnnnnnnnnnnnnnnnnnnnnnnnnnnnnnnnnnnnnnnnnnnnnnnnnnnnnnnnnnnnnnnnnnnnnnnnnnnnnnnnnnnnnnnnnnnnnnnnnnnnnnnnnnnnttatataaataatattactctatagaaattctaaagagaagcagtaaatattaaaaataggataattataacgttaaagtgatcaattttttttaaaattagtaatctatatatttcttaaaaaatattttttattggtttttttgcttaaacttgctatatacaagattacaaggcacatgcgaatgcattgcattttttatgatatacaggacaatgccagtattttcaatgtagtaatccattgattgaagttgcataattttaatattaatgatttttaaatgagtccaactatggtatattggtttttctannnnnnnnnnatatgtgtaatacaatttgttatactaactaacgcgcgctaacggtgtagtaaccctttttgatactatcagctaaaaaagaaaaagaaaaatccctttttggtacaattatttactaaagtagtttaaacatatgcgcgcatgttagagatgcttttaagttttaacactttttcattaggttaatgtcaaggttattcatgtttgatttcttttttaaaggaaaaaaaaaactggaaaaaagtagggagaaagagagataaaaacatttaagattaacatatatattaatgattataaaatcaataattatcctaataaaggaaaatcaataattaatattattattattatttccataaattattatacatatattttagtgaaatgaagctctgttcgagtttctccattcgaattaactggtacgcaaacgcaatttcattgtaacacaattgaattataaactttcactgttaagagattttgtgggcctaggataaatgcataggtttgtacaagtggaaatgaatacagtaatgtgatattttttattcttatttaaatatacttttaataaatataaaataaggttttaataatttgatttcgatcattattttttttataaataactttggttcttgtaaatattttctttaaaaaaaagtatactttgcctttttagtgatgagatagtatgcagtatgcatttacttgtatcagtacacttgtaatgatttaagtaatataattagatgtatgtcatgtgattattaagtagtaattggattcgggctatgcagcaaacaactcatggttatggtggtctcaacctgattggaatcacattaatcattcgtcttagcttagttttttttttccaaaaaagtattaagtagtaatgaaaattattttaatatttaatttagtacttatttattaaatattaagaaaattttataagagagtataatgtaccgtaagtcttatttaaaagagtgtcctcgaaaatcgcaattgattatttaaacaggtaagaattaagtaaatgtttgaattgaaattaaaaatattgtgtgtacattttaatgtaaatttaatgaatacaaaaataagagtttgacaaaattatttttgtttcaaaagtaacttctttttttttttatattgaaaatcaagcatgcactgagaaggttgtttccaaagaagttcatgcagaagagctcaataaggtatggctaattagtttactattattctcaacacggtatgaatgaatatgcgccataagcacatcagttattccctttataattagctcaatcacgtagggtaccctcaattaatattcaaattcaaattacatactagtacaaattaggagtgtttgtgattttagtttacatttataattatttaaatttaaatttaactggattaatatttgataatatatgagataagatagcttcaattttatttattgacataatatattgatactaatattatgtttgataaatcacaaatttaaaaatataaaactaaaattaacatatatttaaaaataaataaattttatataaatattttcgcgtgttatgtcaaatgttattttattaagtgaatagattttattattagtatgtaattattaatacacatttaatacaaatatagatcaataggtctagtggaatgactcaaaatatagctaaaacttattcttaaaatatattggtttatttatttttaattcaaatatgtaaagattaaatttaagccgagttagattagtgaaataaaatagattgtgagtactcttaatataattatcactctctctttttgaagaatttcatccataaactataaattattttagtttaatgcaagatgttagtgtggaaagttttatatatcaactaataaaaaagtcacaattagggagatagccataatgaggtcaattgattcaaagatgaattgctcaagtatggtgtagttttggtcatgcacttaagaaggttgagttttggattgtaagcatataaaggaggattgtaaaagaaactattttacaaatgtgaggttattaaactcattagggatgagggtgaggtgtgtatttatatacaaacccaactccactcttgaaaagcatgaaaaaaaaaatcgaagctgaatctggtcaaagtggattttcttatcaaagtcaattcattaaatgagcactcacaattttaggtgtaattgtcatgcgtaaagacactcattatatccgtctaaaaaaatacacgttctaatgtaaattgctattgataaacctttttttttttttttatctttgactgttggaaaatgatgcgtgggcttgtaaacatctaggaaagaaatagatagaataaaagaaaaaataaagtgtatataatttaccaacgacttgttgcggctgagtttggattcttaaggcggttgatagaaaatatcttactgaagattgttagctagaattgcattaaaaatatagtgattaataaaatcgattatagttcacacctacatggtataaaagaaaagaagtatataattcatacatatatttattttaaacacaatgcgctccttcttcaaccatacgcttctgtctgtgtcaaagcataccaattttctcatttctcaagtacttcatttttctccttgatttgtggcgcataacgaatttgcggaatccaaaaccagaagaaccgcaccttgataatggccctaccctaacttctccattctatacgttgcattgaacatcaaaacttgtctcaacaaaaacttaagtccagttagggtggtttttcgttttttttttaataaaaaaatcagttttaatttttagttttgagtttcgatttattttttatttttagtttttagttttgattacaaattaaagataaataaaataagtcaacaattttattttatttcaccctactatgaaataatgaaattgacaaaggtagcaatttgtgataataatggttatgacaatggtggtggaatgaaacattggtgaaacgatgatggtaatagtgatagaatgaaaatggtgacgatagtggtggtggaatgttgatgctagtattttaaaattcagactaactcggtcggttgaatcgattcaactgtaacctaaaggtctggttggattgagttgcctattgaatcaactatgcattgatcctagtgcaacttggtacgactcagccaagtttgatatgttgactcaatgacctgggccaggtcatgtccaagggaggaaacacactaattaatacatgtcaattaaggtttgatataaaattttatcattttctaataaagattaggtaatgcaggtcaattaatgattgttggtttgaccattgactcagtgaccaaatgtcttgattgagttaatcatcgattttgtttttaaaattatgggtgacgacagggtggtataatggcaatggaagcgatagtgtgatggtggtggtggtggcgacgctagtggtgacagtgacaataatgatgatggtgacaacaataatgatatgatggaataatagtagcaatgatggaaataacgatgaaagtgataatgataatggtggtgaaatggtggagactatagtggtagtggtgaaaacggtaatggtgtagtgtggtgatgacaatgatgatggtgatgattgtggtagagacaatgatggaatgataataacgatgatgcaaacgatagtgatggtggttaaaatgattttttttttaactaaaaaccaattcataaaatattttttttcttgattttgataataaatataaaattattttgaaattgagttaaaaaccaattcaactttatttttatcaaacatattttattttgaaaattgaaaacaaaaaattgtaatcactccaaagaagaccttaggaaccgttaagtgtgggtcaagtggtactattccctttctacctcttgcattagtatttgttttagattttttggtacaatttgtttttgattcaatgaatatccctaaatatttaggggatttgtaaatatttattattaacttattaaaataattgctaataataataagatataaagtttaaacaagaaagactatgcactcgatcaaaaaggaaaatatgcacacacacacacacttttccattatcatcatccaattaaaaattattatttaagataagtttattatattttattaaattattttaaaatgttagatcaacgtttatttataattttttcatcatttatgataaatttattaacttttataaaattatttaaaaatatgatattaataatgatttataattaaataagtgtacaattattttatattataagtgttctaccactaaattttaaagttaatattaaatctctatttaaannnnnnnnnnnnnnnnnnnnnnnnnnnnnnnnnnnnnnnnnnnnnnnnnnnnnnnnnnnnnnnnnnnnnnnnnnnnnnnnnnnnnnnnnnnnnnnnnnnnnnnnnnnnnnnnnnnnnnnnnnnnnnnnnnnnnnnnnnnnnnnnnnnnnnnnnnnnnnnnnnnnnnnnnnnnnnnnnnnnnnnnnnnnnnnnnnnnnnnnnnnnnnnnnnnnnnnnnnnnnnnnnnnnnnnnnnnnnnnnnnnnnnnnnnnnnnnnnnnnnnnnnnnnnnnnnnnnnnnnnnnnnnnnnnnnnnnnnnnnnnnnnnnnnnnnnnnnnnnnnnnnnnnnnnnnnnnnnnnnnnnnnnnnnnnnnnnnnnnnnnnnnnnnnnnnnnnnnnnnnnnnnnnnnnnnnnnnnnnnnnnnnnnnnnnnnnnnnnnnnnnnnnnnnnnnnnnnnnnnnnnnnnnnnnnnnnnnnnnnnnnnnnnnnnnnnnnnnnnnnnnnnnnnnnnnnnnnnnnnnnnnnnnnnnnnnnnnnnnnnnnnnnnnnnnnnnnnnnnnnnnnnnnnnnnnnnnnnnnnnnnnnnnnnnnnnnnnnnnnnnnnnnnnnnnnnnnnnnnnnnnnnnnnnnnnnnnnnnnnnnnnnnnnnnnnnnnnnnnnnnnnnnnnnnnnnnnnnntagaaaatttaaaatttatttcctatcaactgtcctctaaaatcaaaattctcatttttaaatctctgttaagttttttttatataaaaaaatagtttatgcaatacaaaagatcaatatttatatttacataattaaattttacaataaaattaaaatttatgataaataaatatttttaacatataaattatattttagattcatgataaataatttatattataatataaggttattttcaactatttgatacttgtatttttttaaaatattgagattggatttaaaaataaaagatgaaaaggataattgaaaaagataaatggttaagaaaattaaatatatagatgaagataattgaaaaagggtttgagcattgaggtagtctataaaaattgtttgagtcagtgttaaataaaataaaattaaaaatttaaatcgagaaatatatttaggaaaaagatgtataatatatgatattaggaagatagcatgtatttcaataagagtatttttttttactgcatctcaataagagtaataaccactctaaatgtgatttaataatttttttttattaaggacttccattgaagaataactcataaatgcattattattgaagatgactttaaagagtagagaattaagaaatatacatggtagtattaattttataattgtaaagtcaattactattctcaaagaaagaaggtttaaaaagaactatagtagttgttttaaaggcttaatctcaaaccaacatggctaaatatagaaaggggaatgaccaaaagcccccattttcttccagaatattctttgtaaaatccaaaatcagcacccaccagtcctcagatgcacagcaacaaatatatatagagagagagtgcgttgtttcgtgacttgtgaatatgagccaccatttaagactacaacacatgcgtgatcaataagccataccctttgttacacattcttcattaatctcaaccctagatcttcctcttcaagcccctccctttgcgtcatcccaactcaaccaccacttcaccctcgttccatcactcacccttttcaaaccccagatctctccaattctcgctcttattgatttcaacgccataccaaaatttcatattattcgttttttcactcttttttggccttaatcacttctggggtggtcttgtttcttgacaaaattgctgcttttttgctttatttgttctcaattctgcgtttcttttagtggggtcctcttgaattgcactgtttttgttataaactcgttgtttccttgcttagatctagttgtgtttgggtatgctttatatgcggttgtagtgtattgttgtaagtgagttctcatggcaatgccatcgggaaatgtggtaatacaggacaaaatgcagtttccaagtggcggtgccggtgccggtggtgctggcggagagatccaccagccccactaccgccagcaatggtatgttgatgagagggatgggcttattggctggctgcgaagcgaattcgcagctgccaatgccatcatagactccctttgtcaccatttacgcgttgttggtgaccctggggagtatgatatggtcattggggccattcagcaaaggaggtgtaattggaaccaggtgctgatgatgcagcaatacttttctgtggctgatgtggcgtatgcactgcagcaagtggcgtggatgaggcagcagaggcctctggatccagtgaaagtgggtgcaaaggaagttaggaaatccggttcgggataccggcatgggcagagatttgagcctgtaaaggaaggttataattctagtgtagagtcttataatcaatatgatgctaatgttacggttactggaggcacggagaaagggactccagttgttgagaagagtgaagaacgtaaatctggtggaaaggttgagaaagtgggggataagggtttagcatctgctgaagagaagaaaggtaaataatgggtcaatcagtctgtatgtatttatacatttatttgattatgctacaacatggtgaatcatggactgattgactgtcgatattaacagtgttttgtgttcattataatccaagtagtagtgaaatgagagcaacaatttatagaaagtccgtggagataatcagatcattttatgcatgtgtttgcatataaaaatacaattttgatgaggaaagtaaaagatctcttatttaagaatcattgtggaaaggctaggtactagcaggaattagtgtcaaactagaatacttgcaaaagacaattcatggagttgttgctgactaaaaattcaaatggtcaaatgttaaaattaaggctgttttttttttttttggttgtttcttatgatctggtgccttctgctatccaattaatggaaagatagaggataagttcactgatcattaatacacaagaaatgcctgcagtctattaacttctttgctctcttgcttgtgtgagcagatggtataacatcacatcaaactgatggcagcctgaagagcacaaggagtactgaaggatattggtccaacttagaatctgaagctgttgtaaatgatgaatgtatgtctaatcctaaaggtcttcttcctcctgacaatgatgatggtgaagatatattatagatcttgtttaacttaaaagagtttagggcagcagacgaatgctagttgcattgcattcatgaagtttaggaaccgagaaaatgatatttggactgtacccatcaccccctccttttgtcacatgaatgcaatatagttaaagtttgggtgtgaaataacacaaatgtaggtgctgactcttgtttgatttagagatacactgagagtcaattctcatgcagtttataatcatagttttctgtgctgattttttgtttaatactagtatttgtttatatcaatccttatatttataaatcagtcttcaatcttggatgtgaagacatttttattttattatattctcttgctctgtgtaacacactgacacatgaccttaccattatttagcacttatttttatatttttgaacattttaaaattattaattttaaaatgttcttttatattgatatttattttttgtctaaactatcctgttacattaaattcaacttctcaaatctcagctataattacttttaaatttttaatattaattttattttactttaaaattgattctttttatttttatattttaaatttgctcgctttctctgaatatttgtgttttagatccatactttttagttaaatgacactaaactcttgtgaaatgtgtttacagggaacaattcacattctgtgcaaaatcaacatcagagccaaagtctttctaccaaagcaaaaacttttattggcaatgaaatgtttgatgggaagacggtagggtcctttaaaatgtttcttcacttttcttgatgtcattatttcaggatgggtatatgccttctcataagttttcttttatttttcgtctatcttttatattctatattttaagatgcaactttatattttttcacttttaggtgaatgtggttgatggactgaagttgtatgaagatttatttgatagcactgaagttgcaaatcttgtttcattggtcaatgatctaagggtatctggaaaaaaaggacagttacaaggtaaatgtactatctgtgttctatcttcggactgaaagattgttactgcttccctttttaatagtacttgattcatagcaaataggtgtggccatatgcatggcaggccctttgcccatgttcttaaagctcgaggtttctgtgtaaaaaggtggttgacttgtatctatttttctttggttcatctcagtatttgaatagtcatggacagataatcagcttgcactattctcagttaatgacaatgagtagtatatgagtcatgagttctaatatataatttgctcatggtaagtaatatgaatcatagtatgtgtttttcccaagcccaaaaggggagtgatctgataacttgctgtcaggggagtcagctggttcaccaatggcatttatacgtgtggatcagattcaagaggtgagggatagagagatagcagcaaaccttgaggcggctatgtttaggccctttttataacttctttccttatccttagtcttagtcactaatgtgttcattggtaccctaattattgcgtcaagcactcaagccctagtccagaacagtgcatttcctgatattcatctttttccttactattgctaccattaattctatgtctgttaatgattaaatttttttgaagacccaagagaatgcataagcatacacaggaattggacagtaaggtttgctagggacagacaaggagaaaaggagcaaaaagaatgcgtattaccctattactgtattttatccgacatccgcatgttggttgatgctcaatttgataattgggcacttgtaatacatatatgctgatgttcagattgattattgtattttatgttctgcggggaaatgatttttgcttttgttgtcaccatagatcattcaagcttttgttttaaattttaaaaaatgtattgttagttgctgaatatcttttataagcaggaagtcaggcatatatagtttcaagaaggcccatgaaagggcatggaagggagatgattcagttgggtgttccaatggctgatgccccagcagaaggggaaaatatgacaggagcctccaaaggcatgttgtattattattatgtgattttctttagataccaatctactatagtttacaaaagtttattatttggagtcttttttaccacccttgtaataatggttttttttttttcaacttttactgattgaatctggcagatatgaatgtagaacctattccttccttgtttcaagatattattgagcgtatggtttcctcgcaagtaatgactgtgaagcctgattgttgcattgtggatttctataatgaggttgatttttctattctactttttatgagaaaagctagcaacactagttaacacattttttcataactctattattgggtgaaattcatgtgagtcctactttcaaaaccctatttagtaggtcacatggatttgatctaataattaatggtgtgtggaaaagagaatggtaaacagtgtattgctagcattctaaatttttatttattggttatcagatgttttaacctgacctggcatcacaattgtctattgcctatagggtgatcactcacaaccccacagttggccatcatggtatggaaggcctgtttatatcctttttctgactgaatgtgaaatgacctttggaagagtaattgcctcagagcatcctggggattataggggtggtatcaagctttctctagttcctgggtaatgcttgttaaccttgtcttttactatgataatgcacctgatatttgttctataatattgttcttgagaaattacaattgagtgtaatttggctctggtgaccatgattatatatgtgtgtaatgcacaagagaattctccattttatacgggtgacaatatttgtcttttgtcattagttgtaactttacaattaaaaggtttccactattacttaatcttatcacaaggtgccctctttgtttgctaagcgggagtctgtgggacttgaatgttttgggtcattccattcttggaggtgattataaagttggaaaacctttgtagagcatgcttactttgcttgttgctgttattaattttgggagtagactctacagcatcatgtgcattctgggtgtgcagaattcattgtgaggggagagcttcttgttttaatgtgttacactagtactgcaatctgcaagccgtctacctgttatgctgattctatacttgatatctgatatgatttttggctttggctgttataggtcccttctggttatgcaaggtaaatccagtgattttgctaagcatgctcttccttccgtctgcaaacaacgcatacttgttaccttcacaaagtctcaaccaagaaagtcactatcaagtgatgctcaacggcttgcctcgacagcaacatcttctcattggggtccattgccaagccgatcccccaatcatgtccgtcatcacgtaggctccaagcattatgctacacttccaacaactggagtactgccagctccacccattcgaccacaaatggcagctccggttggcatgcaaccattgtttgttactgcaccagttgtacctcccatgccatttcctgcccctgttgcaatcccactcggttctactggatggacagcagcacctcctccaaggcatccccctcctcgagtccctgctcctgggacaggagtcttcctacctccaccaggctcaggtaattcatctcaacagttaccagcaggtactttggctgaagtgaacccaagcatggaaactccaaccataccggagaaggaaaatgggaaaactaatcagaatagtacaaatgcatcaccaaaaggaaaagtgcaaaagcaagaatgcaatgggcatgctgctgatggaactcaagttgaaccagctctagagacacggcaagatagcaatgacaaagctgcagcatgtcattgagctgtaccatgcttacagagagatagagagaggaaaagctaatcacacgaacactataggcagtgaacttgagtttgaagcaaatgtaaagcgcggcaacacgagagatatcactatactgcaggggagaacaagggaaggagggagaacttttggttctctctgtaatcctttctttgctccattccttttttgttgtcttaaaaaatattaactattacaggaagggaaacccattcttaattctaattttagcatttcctatcttaattattttattttaatgcatcttgctgttaatattgatcttgtggtagtgtttgcgtgtttcaactggatttgttaaaacttaactagtttaagacatacaaaatggcatgttgagacggaatcaaatagaagttggcaacttattctattgaaaatgggtaaatcagcttattatatcatgttcagttccatttgaaacttgtcaattaaataattaacaataccgatacaacaccagtttagaaactattgtaatattgccctactatgttccaaaaaccattagacatttgtcatgtcctaaacaagaaggaaattggacatccaaacctaaattctttgtcaaggtttgacaaacaaacaagtcaacattattgagctccttaatattaagattctacaaaaagcactacaagatagaagctaactcttgaaatctttggaggacgttcaatctcttctgaataaaattagatttcgtgcctgttcaatatatgaatttataaaatgatatattaatttcttattgtgcagtttattaataatgatattaaacattttgttattattttgaagatatttatatagagatgcgaagtcaaacggagacttaagaagtgtctaatagtaaacaaacacttattttttccctttatcatatttttttcttctcaactttcttgtatctattaaatagattttcaattaaagtttggtgaaaaaatgtattgtatagataatcaatctgcgtaaacattctctttgcgataaatatattgcaaaagtacatttctgtcttaagtaaaaatctttgactttgaagtaagatatttgagtagggatacgaaagatatttcacgtatctatttatatcattgaattttatattttcttttattttaatggtgcattcaaaattgttttgtcgtgatttttttatttatttataataattgtactgaggtttgaatgaatatgttagaatttgattactgtctagatcatataatttctttgtatttgatgataggttgatagttaagttgtattttatttaaacatttaaaattacttaaaacattttaatataatgaaatacactagtaatataaaaaattatattattattatctaattatcaattatcatatgttttaaaattataaattgtaattataattacttaaaataatattttaatttttttaattaattagaatgtaatagtttttacggtcacagtatattaaaattaaacgtttttaatatagcttgttaattttgattctttttagtttttatatataaacataaattttgcagttgaagagcttagccctaacccgggtaagaaaggtgggtaaagtacgtgataaagcgggtatgcggaagcagtcagcaattacgcagagagtaaagtttcaactttcaaagacatgacatgcgaatccgatccgtaggtaataataacatttgaagaagaaacacaaacacacgacacggagttcagtagcaatgtccgaggttgagtttgtacctcaaccaccacgcctcttcatccccaacttcctctccctcgacgaatgcagagttagtttctttctttgcttgctttaattaaacatttgctctttctttttattctgattttgattttggtgaaggaattggaattcatccacaagagtagcagcacggtgggttacagacccaatgtcttctccaccactctctcccatctcattgctaccaattcttcccacttcatcattccttttatacccatcagaggtacttttacatcaaaacttcatttttagttacccccacaatttaacaatctctttcaagtttatttgtttttatttgtttccgaatttggtggcagaacggttgaaagacaagttagaggagtttttcaagtgtgagtatgagctcttcgttgaattcactggtttaatcaggttggttaccttaccttacctcgattcaatgtctggttttttattctctatttgataagcatttttaccatcttgtttaatggtactatgaatcagttggagcagaggagcaagcattggatggcatagtgatgataacaggccctacctcaaacaacgtcacttctcagtgagtattattcaaccgatcaacccctttttgaggtattgaattcttgttatgttattcactattgatcactacctttttctcccttttggtaataccatgaaaggcagtctgctatttgaacacttatggccaggatttcagtggtggactctttcacttccaggatggtgagcccaagtcaattgtgccaaaagccggagtgagtttttccttcttttttttttttttttttaaaaaaaaaatgtaattcaatctgctgttaacattcttacggtggcatagtatgtcttgcgaaattcgttattgaactataatatgttcatttatcattccaagtaggaaatgagcagtctttcactgtgtttatctttatttgaatttgaggatgattggtttttatttcaggatgttgtgatgtacacagctgatgaccgtaacattcattctgttgatgaggtatattcaaatgctctcttttcttttgagtgtctatttatttacttggttgtacatgttcaactttaatattaaatcataatggaatctttattgcctcctccctaactcccgagtccaagaaaaagaattctttgtaaactaacatgatttggcttcttatattgattattgtttctctcatcaatcagcctcaatcaagagttgatcttgattattgtcatgccaacaatacatttccctaattcaaacgtgattcatttcccttaatcataaacagtgtataaatatgttgtacatcattcataacatacataagaaattattctatccatttcaaatgagtgcaaagagtaagtaggctgctgttatctattaaaattttaattgcatttataacctcatggcttctattaaattttcaacaaatatgataatagaataaagacctttctgtttcatttggacaaaatatgcagacagaaaactttcatctgttatggactatcaatagatattgaatagattttgagattgatgtaggtaacagttgtaaataattttttgaaggactaaatggctataaaatcattctttcatggagcgaatgatagttcaatcatcaataaatatatgtctcttaaatttttctgatatgaagttatctttttacagataactgaaggagaaaggctcacacttgctttatggttcagtcgtgatggctcccatgatgaggatatgaagctcatttctcttctttcacgacacctgttgcatgactacatggctgattcatacctacctttgccagcatccagtaatatgtactggttttctaaggaccaagctttcgattatcagttcggttttaatatatgctgggctagactgcatgttcttggatatgacatatatatttctcaagacagtagctgtgagtccgatgtctctgaattactggtaaagccggtgcgcttagtgaggggggatgagttgctagaccaggaatttgtcaatattatgcatgcacttcaggtattttaaagaatcctatctatgtttttcacccctgttaatattaaagatcaagtgtatagcaaatgcacgtaactatacattgaaagcctataagaagtgaccatgatttttggtcttctttctcatccttcacaaaaagcagatttataaaaaccactggtactcaatcctttgttgtgcttggcaaagctgtcaaagcaaaacaaaactaactagaaatttagttttccactttacccaatggagagaatcctttttccgatgttagatattattattatttttaaaagaagagattcatgaggacaaagagataattataagtttagtagatttgattgatgaaaactatcaatgtgttatgtgtagcacaatcggaccatccatcaatttttattttcttttgataatgaaaactttatgtgattgggtcccaggggctcaccaggatcagggcaagcctcaagcctcaatgagcgcttatagaggtacttacagattacccatcaacaaggtcctcacatcagcagcgggaattgaacccacgtccttgtgggatatgagtccgttccttaccaattggacaacctttgttggctgatcatgcatcaatatatatgtgggaaattcttgctatttattatatggagaatgctttctagaaagtataggttaactgtcaacctgagtgcattgcatcaactaggactttctatatcttgatgttaagaatagaaaatatagcacatgtttttggaattttgttgtaaaagttgtctggatgtgtttcttttctttttagtaactctatttcagcacgactatagaagggatcttgaaaaggtaaactgggtcccccaagtttctttaagagacttaaaaatatatgtacctttgctcttatatttgcattttatgatgtaatatggtcccttcatttttctttaactgcatttactactgttgtttatgcatcaatgatttcttgcaatatataatcttgatttgttttggaaaagtttctgcaactactctgattcatgttctttgctagaacaggttgtccatttctattgttggaaaggatcagttttactgaacaagatgtcaaatatagactccatggtagtaaaagtgacagatgtgcagagagagaaaatcagtggtctgaattctgtacttttgaatgatgatcattttgcatccaaagttttctgcaatatgccttccgaagaaaatggatgcatttgctttcactggtcaggaattgtggctgccgttgctgcttgggaagattatgcgatgaacttgagcaaacaaattcatttacaattaccttactggagaacacatgaatctatatatagtgcgcaattagatgagtagtattcatgatcaacgtttccaagaaaaagtaaccacctacaattgtgcttgggttaaaaatttggaaagaagcactggtgaaacaacttgaaagtagtttgtgaaggtttgctttaatagcattttggaaagttttaaggcgaagcttcttggggagacatgagaaatgaaactgacggatatctcaagatttatcataaatgtaaatgttatgcatacttgatgtagattgggttgccctgctaagtagagcactcatggatttttctgcatcaatactagattgcaaatactacaaattgtgtatgcctttgtttctgaaacgttcttttttcttctttgctttgttacaaatagtacatttttaagtttccctaattgtcagccagaggggcctccattttcataacatagagctggtaatgtgtgtactttagcttattatatccaggctgctacgttacggtctttggatatgctccatgtatgcaaaactttgccaaaagcatcataaaatatgatatctgctttgcttttggtgatctgcatagacatgaatccttgcccatcataatacaacttcagttcttccagtttccacggcttgacatcacccgaccatgcctttgatccacctccacttgttataaagtgaattccactggattgtttatgcaaaccacagaaacttgaatgtcagaacagtgatgatgttgaagctaatcatttaagagtaagatatatgcttacctattattgtcaattatgtgctgcaagcagtggtcatgtccatttatgtatgcatcaacatcgttcgcctggaccaataatgaagaaactaactattctgaaattataaagttttcatgcaacgatttcaaccattataagggaattaaagttttaacatggtctcagctaatttacttatgaaacctggttaactgacctagtagttacactatgtaatatgtatcatctttaacaaatactgaagggggcatttggtaattataagatatcttggtgtcttagatatgcaaatgtttggaaaatggaatgccgacatggcagcaatgtacttgtcatactaaaaacacgaggaatgttaaatacgagtaattaacgtattaatatgagaatgtgatttgattacctctaagatgggaacaagtagctgtttaagctcttcggtgttaccatgatgcccagcactgttgatggtatgatgacccaccaccatcttccattttgcttttgattgagccaaagctgaatcaatatcctacagaaagatttcagggacagtccataatttccctccttttaatgttgcaattaaacgatagatgtattaatgcaaatttaaagtctttgatatcttagtggtaataagttttttgacttgtttaaaacgatgttacattttcctaaaccatgtcataattttcaattgtgaattatttcaagaaaataaatacaaaaatggccgtttattttattttttttaatagtttttagaactcactaagacattatttcttgacaaaagtcaacaaatttgaatttgtaagttgtaacttgtaaccaaccttcaagagttctgaaaggtaagttaggcgaggaagaacgccttcccagtcataggtatgctctcccgggtctgtgaagtactcgtctacaaatggagtcgtgtccacaaagaaaaattccacaatttctacataaataacgggcaaaaacacaattgttacaaggtttaattcaataaatgaatacttttattatgtaatcatcacaaaacattacagcatcaattacattatttacaacaacaaccaagtcgtatctcactagatgagatcgattacataaatcatataacgtaattcaatacaattaaaaactatagtttcaccatcgttttagaaagaaatatgttgtgaataattcatgttaagtataacggtttcgaacatcaattacataatttcatttaaattattatttcttaaaatacaaatgtgtaaattatacctccatcgagaataaaagatctcatgcaaagccatctgctatctttttgttttagaattggacttagttgtgcctcaacatcacctctgtagtcatggttacccagaactatcacagtaaaaaaagaaaaagaaaaaggaagatcaattgcttaattagcaaataattttataaaattggcacaccaaaaaccatgcttaagtatttgtattttgtagtattaacttaccagtgtaccatgtcttttgcaagctcggggcagtgtacatgtcgacgaatgattggtagaatgctggatcatcaaccccttttagtccatcttcgtaaaaattgtcaccagtggagatcacaaaatctatgtctagtttctctcccacaattcccatctaaaaaaataagcaatgaagagttactacttgatacctcaaaagaggaagaaaaaaaaaccatactagcaacttaaaaatgggattggctgtttgtaaaatctaaacttaattatctcactttatagtagatgtgcatacaacatttttggagtcaaatgcgttattaaccgttcaatgtcaaaccctcgagcttaaacatgatagaaagcaggaactgccacatctaaatgtgaggaaataatagcttttcttttgtgaataatgtagaagaatgtaaatgtaagatggagtacattagcgtctcaatttcttaataagatcttggaggaatgccatatattattctgtcaaacttgtaagttcgttcatgtgtattttgttttattctagataggatggttttataagaaaaaaaggttcttgtctatttctgcgaaaataaacttctatgatttaataataactaacttggttttgatgaatttgagtatagttattgttttatattgtcatctaattatactttgttatatttttagaaatattgagcacattacataattattatcattgtcaaaatttttaataatatgtgatgctatttaatttaattatagttttttatataattacaatacacaggaacagtttttatttacttttaaaaatgtataataaattgcacaatttaaattagatgcagtaggtggatcgaaacaatttggcctttatatgtagactgaacagaacacatgggcttatctaggttctatggggttgagtcaatcacaattttctcattgagggctagatctcatcgagaaataacttatttggaatttgcttacacctcaagagtaagaactcttgaatcattcaagtgtctaactcaatcaagttaatttattgagtgatgattgtctcttacttatatatatatatatatattttttattgtagacttatttctattttatatctaatatttttagacttagtgtggagataacatgatgtgtgacttttttaatgaatttaggataaataatgatactatcttagaatatgaatttgaatctagctcaatcctataaactagttcataaagtaaaaagaaaatgaataataccaacaaatcaagtttacacgagtacattgcagaattatatagcaacacctaataatcctaatatcctattatctctggtatgtttttaattaattttatcctttttgtctcttttctctcttctatattataaattttaacaatatatgaattttttctaatatatatagttttttttttacttttaaaaattaatagcaaataattttttgaaagacgtatgtatgacttgagtttttagattgctttatttttagaccgtcccgatcaatgtgacgtgtatttcaattgttattattattgttatttttaaaagcatcattttgttgtattggaatatgccttggaatatacatatcgtctatgttgtattggaatatgcgtgggattatctccacaagattaaagctttgatgcttggccacgtcgttgtggtggtttagaaaccataggtctcacaagtgttgtccaaatgcattaaaaactctacagtgtctacactatatgaaggtttcatatttgattactagacaaaggtttgggaccatagttttgggggagagagattatcagaggcagaaattaaaatcgcgcatcccaaattctaaaagacaccactataaaaattaaaaagggcaaaggtagatgagtgatgatgacatgtatgttagtatcattaactagtggaagacagggatagatagatagaagacaaaaaaaagaagtaactggtcaaatgtgtaacgtccactttgttttgggggtggatgagggagtaattggaagagtaacattataaaaaaaaaaaaannnnnnnnnnnaaaaaacagaagagaatatacttaatgcatgttaatcaataataacctgataaagctaagggaaaaagtgaatttatatattaagaaacccgtaaagctaaagacgtgaattaatgctttaaaatgtatcagcatctatgcgaagcatatggaatatgcctcagatttatatatatgtttgatgaaatatattaacataaaaaataataataaatcaattcaatttaaactgatttagactagttaaattgaattggttttagatttttaactaaatcaattggacgatataatgaaaactgattaattaattgaatgaattgatttttctcgttatcaattctgcaaaaatgctattagtttttgtacatagttcgactaaacatacggatactgaaaataccaaagtgcactccgtatagttagcatcaccattgcttttagtcttaaacaggggttatacttatgtgattaactaaatatccataatttagactttgggtaagagcattttttcatgtgaactaaccgatcacatgttatgtgcaggtgcatgcaaatttaatgtgcagaactataatatattccattgaattatgctttgtataattatctattgattatatatgacaatgagattgataaccttctaacaaatatgtctaagaaattaaaaatgaagatataaaagaagagggagattaggcaaaaattaaacctgattggcgaccaaagattgattgtaggttccttttcttccccaatctccaaggatcaatatattaagagattgttgtttttttggagggtgtttgaatatgggaagttccgcaatagaaggagttaccattaagcagaatataccaactacgaacataagagggaataacatgcgttggtttaaagatgaagccatggtttaatttttaaggacctgcaagttctccaacccagagaatgagagaaagagagagggagggatagagagattgcaattttatgagagaagatactatatatatacatacatacaaatttgaacgtaataaataatattttttcttttaagatagaatattaaataacagttataaactgtactgtatattttatacaagacatatacgctactgttaatttataaattataaaactatgaaattaatataaaattattaaaatattattttatttctcatactcaacacttgaaattttaattattttatttataaatattttttctagtaaatcttaatcaaactaaaagtaccacataattttttttttaaaaaaaagtgttacgaaaagatgtattttaacataaataataatgcaaacatagacaatcttcttcctacgaaaagaatagcgtacacgattgttaatccaagaaacttctgatggtattcttttataccaacagtacaacgcatattcctatttcccatttccttcggaaggaagagaggggaaaagaataaatatctgacattctttattttttattttttattggccttttcacatttacttccttttcagatttaattgtagttttaattctaattgtataaattaatggcttcctaattaaaaaatttaaaggataacattttattataaacatcatataggaaaatacataaaattcatgaataaaacaattttacgaatttcaataaattttttctttcaattctttaaccaatgtctcaataaccttatggtactaattaatatttgcttataaattaaaaggagaagttcatttaaatttatcaaagaaaattcttttcaaagtgttaaattatttaatgtcaatatttagtttactaaataatccaactataaattaaaagaattcaattcattttttttaaaaaacaattactttttaaagtaattaattatttgttgtaaatatttagtttgcctttttctttttgaaacagaaagctcaattcatatctgcattaatagatagcatgaatacactggtaccggtgtatgccaaaaaattgaattgaactgcattttatatatcaattagtaataattttgaccatttttttggcatataaaagttcatcactatcttttaaccaatttagagttttttcacaaacaatttactgaaaatatgcacaaaaattgtttacctgcaaatttgtttcaacgtttggaactcgtaattttgttcataatcagatgttattttattttagtatttaaaaagacattaactaactaaatggaataccttaagaagtgggagaaaatgtattaaaagttcttggtgtcgctatgatgcccaacgcttttgattatatgatggccaatcactaccttccaggtcgctgttgattgttttagtgccaaatccacgtccttaccaaattaagcaacgtcaatggtcaaatacatatatcacaaatttgtttaaatttatttattgaaataaatttttattttaataatatatatatatatattttagtatggttgtctaaattatttcctcttaaaaaataattttttgtttattttaagaagtaaattcaatctgttttttaaaaaagttatataaaatacacttattttaaagttatttttattttttttttaaaaaaactcacccataaataaaataattttccttcggtcgaagagaatacttaattaaaacgatatcgtattaattaggtttattcaagtttgaaatggaaattatacctcgcaattccaaatgtcaagtatgtatttatgcatttagaaagaagtttgacttctcttcttaattaaataaaattaaaatatatcacaagtgataagaaaggatatatcttttgccactgcctacccaatatatatatatatatatatatatatatatattttttttttttngaaataaattcccattatattaaatataggagggcttatctttcttcacatttaaatgttttgtattaatgttttttaattcataataaaattaccttgagaaggttagaaatgtaaagcttcctgggtagtacgcctctccagtcgtagatatggccttttttctctatgaagtatttatcgacaaaaggtgttgtgtctacaaaaaagaagtctacattttctgccaccaaataaagcaaaattatatcaataaattctaattgtaaccactgaatatatcagaatgtattgtactgggtaattaaaattctaataacgtccttatctttttgaaaaatgaataacaatttttcttctgatgactgaaaaatatgaaaaaaattataaatatccatcctttttattatcactttttttttatcaatcacttatctcacatataattttttttcatttctcttttaactccattccactttgagatggacgttaatcagaaatttcaaaaaatattataaatttttataggataagaaaacatgttttatatagttgtgtaaaaaaaaacatgttttatatagtatgcagtaaataagagtaacaacaataaaaatcccatccaagaaacaattgttatctaatattatttataggctaaaatgattacactacaataataaataaagagcctaaattttttcatttgaatcataacctgggtaaaagtagaaagattattaaaacagtaagaaaaggattagggaatttatttataaaagcaacatgaaaaannnnnnnnnnnnnnnnnnnnnnnnnnnnnnnnnnnnnnnnnnnnnnnnnnnnnnnnnnnnnnnnnnnnnnnnnnnnnnnnnnnnnnnnnnnnnnnnnnnnnnnnnnnnnnnnnnnnnnnnnnnnnnnnntctctctatatagataattgctaatgtacacttccttatcttaaaaggagtatgctaataaattataattgtgattaaacttatatttaatttaatgtcagatcaagaggttgagtaagattcaacaaaaaaactaaaaaaaactaactcagagtaattagatcggcatgggttaattataattattcatatccatgaacaccttatgttaaataaaatattaagaatacaaatataactctatcatacttaataaaatgtacacttaaataagatgtctcctttctttaaaaccattatagatatataaattgatattatgtgcattttttatttattaaacaacagcgcaagtaatatataataaaagagttgattagcttgttttcttaactttagatgctagtttagtttagccttttctgtttggccaaccgtggtgttttacttattaactactgtttcgtgtctatgattcattaataatagtgattaaattagaacaaaataacaatggtcttaatcaagacgagctttaataggtatgaataagatgaattcaaattcgcttcttgttactcccttagtcccaaaatattcggttaggttatttaacacagatgaagaaaaaataataaatagattaaaaaagaatgataaatttacaaaattaaccttatatcatcattaattcattttaaaattttgtagttcatcataatatataaggaatataagtagaaaaataattaatattacattaaaaaattaaaatcacaattattttaggataatttttttttcttacacaaaaattataatgagatggaggaagtaattattaaagaaaccaaattcaattaaataaataaatagagggctaaaaaagtaggttagtttttttacagagtttatattcttactccgagacatcaactaatgacaaattagaactttgtggtccctgtaacgctccatctactcaacttctgggttggccatgatggtggaccgcagcagtggaagctcggcccaataagagtccatgtttttgaacagaataagagtccttttttagttagtggtccaggtagttatagtagacctcacactaaatgaaaactttcagcctgtttagaaagggaaactccactggatgaagagggttccccacaaaaaggaaactcacaaccaccatttttggggtttgggtttgagcatgctctctatctctctttcactacgccattgtcatttggcaagtttgcatgttgcaaacgtttcacaaggaggaacccaattttaaggaccaaaacgtccaatgctttgtggccattggttcacaataggctcaacgctcaatatgtcagtcaagaccagaggcataccaaaaatatacttaacgtctgttatttcccattgagaacattcttttaccacaaattgtttttgagaaaatgtaactcgaactttgtattaagaaatgagtaaatcccatttcattttgttgtcaaatgaaatggagtttaaaaagagtcataaaaaaaaggttacagaactaaaagaggagagtatttagtgtgaaaatcataaaagaactcaaaaaagatcatatataatgcaattttttgtatctcccaataaaaattttttattttaaattctttaattagtgctctgagggtactggttagcatttaccaaaataataataatattagtgctccggggtcttggaatgctaacatggtatgacaaatgccactggatgatacatatttaatcagaggcaaatgataactagtgcatttaaggtactgcttaaaaaaactaaaaatataattctttttatagaaatgcgtaaaattatgttgtccatgatttttctttttcaatctcttatgattttcataacaaatacttatcctttcagttccttaaccaatgccataaggacattagcccttaattagatatgcctctttttttatgggtccatgcttcagaacttcctcatctctgtaaatggtcaagatatccaacacaaaaagaaagggaaagtctaaatgctgaggttgattgtatagacttgcagtaccgtgttctaaactgtgtaagttctctatgcaatgcaatgatcgattctcaagtagtcaaccaatcaaagaactataaatatataaatttcaagaacccattatccactggcatcatcaacactgaaactcctatcaaatgcataatccacaaaactgtagagaggaaagactcgttccccatacttctcaaatccatccaattcttccttagcctttgctctgagctcttcagctttttctattgccttttcaactccataaacctctgcataactattacccttgtttttcctgtcaccacgtccctcaactttcaatctctcttctataatatcatccataactgcatacaatactccaacagctctcccatacctccttagtctctctatctcatcatcttcagctccagctaagaatcctccacacactgcagaagactcccccatttcaccaaactttttttcttgtataaatccaactgcattgggtcctccttcaaggtccaggaactgccctgcagccattccagtggagcctacagaacgggcgatctcagcaatcacgcgaaggaggtgcgattcaggcacaaggtcagatggagtctgtgaaacaatgtgctgaaatccaaggggaaagagtgcatcacccgcaagaattgccatgtcaacaccatagatggtatggtttgaaggctgaccacgacgtgagggggagtcatccatgcagggaagatcgtcgtgtatcaatgaagctgcatgaacctgatttcaacagaaatataagattaataaacttataaccatgtatgtttaaaatactcaaacacattcagtttatagtcattatttttctagtgaagtaaatatcattacttcataaattccattttgtatcccatcaggagttcaaaacataccgatccagagaatctattttgttaaagaacaatgtaaattgcaaatgtaggtatttttaaacctaaagattcttaacagttcatctaaaggtcaatgtaggtaggtaccctatgatgcaaataaagctagagctagctaaagatggaaaccaaaacacttatttgcatgaacaacacaacacacctacaactaaacatgcatttaatgttattctaaaaataaaaaagaagagggaatcaggatcaggtttataatgaaaagaaaattgtgacaatgataaagcaatctctctcaaatgtctcaagtataataatagaaaaacaaattacaacacaatcaatattaccatttcaagggcacaggcagtggggaaggcggtaaggcggctgcccccaaagagttcacaagcagagatgcacataacaggcggggctcgcttggcacctttggcaaggactgaatacctcatagcttcatatatctgcggaggaaactgaaccggaatagcttcgtcgagcttctgattgatctgcaccattaggttagcccagtatgtcttcaaatcaaagtcagcagcttttgatcgagtggaaaccgaagtttgagaagacgcggcagtagagcagcgaactcgaaacttcaagtttgtgggctttgggaggctgcagatgtgagaagagggcagtgttgcaaaagcaaatggagccatcctcaactactctatatggaaaaaaagaataaagaaaatgaattcaatgttagccttaatatccattccatcaagcaactggtgggcatgaaattttcataaatacgaacctttgcttcattctaatttaagacacaaacaaacacacatagtaaggcacaccaatcaacatggaaaacaactcaaactccaaaaacaaagtccctatgatcaacaatttcaaatttcaacatcatagaaccaatcaacttcagggtcaaacatttctattctatgttaagccaaatagttgaacacccaccacccaaaatactaaattgcacaaaaataagtcaaaaaagaaaaagaaaaaagattaccgacaattgaatcgcaagagtgaatgagatccggcaattggggggagagagagttgagtgataaggtttggtttgggagtcaatgggcgattgcgataaggttatggtatggtacactgtgtatggtacagtgttggcgagaccctgcaaaatacaaatgcggttttttctagcttaaaattggtattttagtttattaatttcattggataaatgtttaattttacataattaaaatttctaataaatattttcttaaaatataaattagtaatatggtaattaaaattcataataaatcattattacttatattttagatcatttaaatcttgatataagattatttttaattataatattttaaaatattaaaatttaaattcaaaaataaaaataaaagactatacattgataggaataagtaattaagataattaaacacataaataaacacacacacaaaaaaaaaaatgcttttgaatatccaaaaatttgaatttgagttaaaacaacttttgattcatgagttaatgataaaaaaaaaagaggataagttcgaaaaggttgagagatttttttaaaaaactaattacaagaatactatataaaatgtgcatctaaaaaagaaaaaaagagagaatattaaaaatggagagtaaaaatcctactttttaaactgtggattctaatttagaagatatgaatttataaaatatggtgactgataaatgataatcttgcaaaacttggaattatccacgactttagtgtggacctatacgacattccttatgctatcctttccttggatttgttagctgacaatcccaatgttgtttctgttagctagttgtttgtttttcgggatttagcccttgtatccagcagaacaataataatatattaatatgtaagccatacaattctattagatttcataatttaaatttctctaattgaatacttatggtttaaattttttattataaagtttttaaatgttagcattataaatatttgttaatattattatatagtatttttatgaattgaattaaaacatactaatactataatagtttttatgccccatcaaccataaatgaacatactattaaaaataattaatttaaaaaatatatatatagagagagagagagaaagagagttatatgttaactataagaatgaaaatatttaggttggcaatttatcaaagttacactcttttataaatatacatataatttaatttttatccattgttatttttcctttgtgactcattatccattataatgtatatatttttatactatcaattaattaacaattattcaaagtataacttttaaaataactattatgagtatattgaataaaaacataaaaaaaataattattatgaaagtcaatatatgggatagtactaaaatagaataactctttacttgtaatttcttttttaaagggattgtaatgattcgatgaaagaaaaatgagatgtagaataatggtgtcaaacaagtcaattcaatccaacctatcttcaactcattgaaaaacaagatgagttgagtttagctcgtttttatattggattaaaattttcaatccaacttaacatgtcaacccattttttttataaaaaaaagatttaatcattgtacttgtcttaatttttttttcaaatttgataatcaaatataatttaaaaagagagaaaaggttacaaatctaataaatcaagaaaatacttataagattatcataaaaatataaacattaaatttagtttgagaaaataaaaaaataaaaaagttttaccgattgaacatgtgaatccaacaagtcaaccttacccacatcaagttgggggtttaacggccaaattaaattacatacatacaaattaatgagttgaaatgtgtaacacaactcaatccatttgtgtggattacatggattgattgattaggtcgaatccattttgatagtgctataatgtaaagagtttagaagttaataaaaatctttcaatgtgtcttttatagtttagtaaaatttattattagcttctaatataatgaacacattgtcttttatatgatttttttttttatattttataggcacaataataacccacaaatctctctttctttccctattctaatcctcagagtgagtccttttaattattaagtattttagaaccctaagttgaagggtgtatgagcagtaggtgttgaaatgatttagtttggatatatatatatatatatatatatatacacacacatgaaggaaacactgcaagaaattcagtacctgttaaccggtataggaatcgttgttgtcaagaaaaaaccatatatttacgtgaagggaacattccaagaaattcagtacctgttaaccggtatagatgtattttattagtaacaaaaattaaaaaccaatcaaacaattaattttcttaaaaaatgattcctaacaacgaactacgattatgtatctcaaaaactgatttcatctatataataataatgcatgaatcatgatggtcatttctacaataatttatgctaccatggtttggtgaattattttctgtgttatgaattgcttcccataagataagaacagaactcttttaaaattaaattaaaacacgtagcaatgatacgatatgatacgatttcctattaacaaatggaccccatggcccatgcgtatggtgcttttctcttcttctccagttgtacaaattgcgttataacaccactcagttagtgttgtttgaaaataccctcctagctcgtcattttcatctggaagcataataagtatatatataaagttgttgccacttgcaatactcatcaatcaaaatccacacccaaagctttcttttttctccatcaaattctctgacctcaccatggggatgcagcttgtttcctcgacagtgcttgagcggtttgaatgagcacctaaacaagatggatcacttagtttcttggtcattgaaaattggggaagaaaaggagcttacaaccaatccgaagttgcattccaagtaagttacattttaatacacaccaaccaattgcatgtcgacaaatattagtcattgttagtatgacatatctctttcctcttttctttccattcaaacaccaaaccaaccttaaaaccgctcaagcaacaatgatagtctatatgagtttggtgcacttaatgctgatcagcaacaatgataatattcatttccctccacaaagtatttttaatattttatttcacttcatttctttcttcacaactttcttctcctcctatttctggcacggtgtgtttacacccatggagtgtataagtacgaatcatttaatttccatgcaaatgcaatcttaataatttagaatgaatttaaaaacatttaggtagtggacaaactagtggccattgatacagcagagaaaccccaaacagttatagcagaggaggagcagccaatgaatatcgtgcttttccttgctatacaaagtggtcactgtgtacagattccttacactctttttgtatccattaattaattaataacaacaaggctcctaaaataataattataatatattaggccaatcatgcagcccatgcacgcgccagtagtttagttcttatttggcccgaaacatctgcatctgtattatctcattgattattttacaaaaatgatttttggcatgacactgtgagagaagaaaaaaaatataaatattataaataatatgataggatataataaaaagagagaaattgtgaatgttaataaagatgataaaattgtagtgttcaaatattatataacctattattttattagtgtgttgaaaaagcaagtggtatattataatgagttaacgactaacgggtaactataaacaagtatattaaatatcttattgaataaattatttaaaaataataaataattttttgataaatcttattaaaaataatacatacatttatattatttaatcacaaacttatatatatatatctaaatttattaattttataataattattttaaaaatcatattaaaaataatttatgattgactaactttacaatttttgtatggcacacttaaattcttgagtgatgctatttgttaagaatggtgagatgcaggaattgggcacggaaactgatgtgtaatgctgacatttttctaaatcaaacattgactagctaataaattaagaaaaatgtaagaagaaatttaactgaatatacagtcgtgtgattttgatgaaatatattcgtcataaatagctagaatttttctaaatttgtgtataaataattattttgtcatggaattttattaaattttattagtttttttatactaatttgaacaatttaatttctgagcaaccaattttaagaattgtttggaccaacaatccaatccaattttatgtctgcaagcaaattatggtcaatttttcatgtgtctttttgcctccgttcaataattaattctgaaaaagaagtgaattaattttttttctagatgggagttattggagagcaattggacatcgatttcgtgatttcaaacggcgacaatttttatgacagtggcttgacaggcatagatgatccaacctttgaagactcatatattcaccaaaatctacactgcttctagcttgcaaaaacaatggtacagtggtaagagttcaatttcataaatcttatttaatttcaacggtacacgtgaaaggaatgcttattagtgcgtgtttaaattttagttggaagaatttataagtattttcatcctacaagtaacaaattcgtcttttttttttttttcattttatgcattagaattgtaataaaattagcaaaaatatttttcaaactttaatacaaatcttgacaagagatggctttgcttgagatcttttactgtaaatgcaggtgtagagcaacctctcttgttttattcttcttcttaatttcaatttatagaaggcttcaaatattaaattcaagtaatataaattcatgtgactttttacattctttgtttcagaagttgcagagtttttctttgtagacactactccgtttgtggacaaatacttcccagaacctaaggaccatgtttatgattggagtggcatattgcctaggaaattaatagtgtgccataaacaaaattgttaagttagtccaactccatatgctttgttcttgaatgcataactaggttatgagctagagccactgtgctcatattgtcacaaaagatcactggtgtagtgtgtttgacttgtaattcagacaacaaagtatgaacccaagtcacttcagcagtagcaagagctaggcttctatacttgatctagccataactttctgcttcttagaccaccaggacacaagattaggtcctagaaaaattgttgctcctgatgttgatctcctatcattggggtctgaagctcaatcaacatcacagtatgcctgaagagagaaatttgaagaggtagaaggttgtcgccttaatccaagattggtagtaccatttatgtgtctgagaattctcttcatagctatccaattttgttttgaaggatctgacataaattggcatactttattcacaaaactaatttcttgtcttgttatggtggcatattgaagtaccccaacaattgatctgtaaagagtagggccagagaacctctttaagcctgatttagagagttttcaacctaaacataggagaagcaatgggatttgcttcatccattttagtctttgctagcagatccctaatatacttgattaagagttcgagagccatgagcttgattagatacttcatcctttgtatagaattaatttattaaaaaatgctagtggtgataaaagtaattcagataatgacagtatgaaagtatcttggaaagatgatatggatttaattacttggaaatattaacctatatatgttaaaccatgctagctctgaattacatggttccataagaaagaagactccaaaggaaaatgctattgcccattaggtcatgaccatttagttgccaaagcaatgttcttggaaaccaaacccctggtaccgacctaccttccattctgattgaactataatcagttcctagatgagatacgcaaacaccaaagtttgctaacataagttaacgaggatgaagagtttatttttgataaaaatagagaagcataaatagagatccgtagcctcataaatttctataaaactagtaaattcgataattttgcgaagaggttttcatagtaacagaaattttccaaagaacagaacagcttagagcaggggggccaataatagtcccagtccaggactgcatgtagatatcatgggcatcatccattccatagctaacagttccatctccaattcccttctcacctctctcaagctcttccaataatctgaagttcctaggaactgcatacatagacaaaaaagtttaacaagataggtgcaaattacaaattaaaaaaaaaagttacaataaaagttgaacacaatcaatgataagttacatttacaagtaaattggaaaaagggagcataagcaaaaacattaaattgcatcataacttgagtatatatttggtcacttctcaatatctgagttcacaaaagtcccaattgacctgcctgaatcttgtctattgttccttcaaatctaataaaagaaagaaccaacgtcaaaacagaaatcccattaactgatctttagaagagtgacaattttacagtacatgttacacaaaactatgtttagcgtttcatataacaagtcaataacaaagagagggggagtcagagagtgcattaaaaatacattcattttcagatgatttttaaaaaatcatcgtagaatgttaactttttaaagatgattttcattatgaaagtttttaagatgatttttgtgttacgaaaatcatttttattgaaaaactttgtattttcaaaattatcatcttaatggtgactaaaacaaaaaaattgttgcaactacgtaaaaaaaccaattaaagcattagaatttaaacatgtacttgtgcatccacacgttgtattagtattagaatttaaacatgtaattgtgcatccacacgttgtattagtgttaaaagtaattttttttactttttttaaattttttttaaaatgtaacatttatagttctttatttcacttatcactttgtaatatttcaacggttgataaaattgacccataaaaaatccaacaattttatacttgcatttattcacgtcatgacatgatctttctaatattaattaattattttttattcaccttatttacttgatgtttttctactattgataagactactaattaattgcttcacaattttcaatcattctcttgttttttttatggtatataagcaaccatatactcatgttatttttttcccctcatgatgtcaatttataccgctttatcttacctttttcccaactaattattaaagtcaaaccttgaccacaatagttgcctgtgaagatttgcaccctggcaatttcttcgacagcacacaagaaaatgacatttgagcttcgagcaaatagggttttatgtaactttctcataagtttaaatcgtcaaatctgttctacaaattaacaatataataaccgtttaacgacaattaaatgtgtgaaattattaaagaaggaaaatgcatgtatcttttcaaagttctttggttcattaggcaagcaaatgtaagtctaagatcattcaaaccccggcccttttgttggagtctttttcttggtttagctaattagataaggacacaaaacttacttataaggatttgaccttttcgatcgagtgattatttgaattttcattaccagcaataattagtgaatttgaacgagaaacaagagttagagtgtattttgacttcctagataaccacaatcgaggtggattattgcatccttacttccatgcatgactaaatttctagaagcatatactatatttatatataaaaacatacaccgagataattatttcactcaaaaaggaagaaacaaaaatataagaaaataagttagcaggtcaatggattgaagagacctgtatgttttcgagctttaagtagtactattggaatcgttatttgcacgtttctgttacccaaatttccttttattaattgtactaataaaatctgacatagttggtaaataattagtcccataaatatattaacagatgttgatttcaaactgtgcgtataaaaaaaaccatactgaaaaaaagttatatatactctgaacaaaagacaccctaagtacataccaaaaagaaaaatccatttattgttgaatttatatatttttttgaacagttattgttgaatttatattggtgagtttttataataatttatcaaataggccttacgtaataccttacttcataagttattctaaattaatagtctgtgatgctaatgatatataacatagtaacctgatttgctaatttatcttaagcacctttcttccgttattctaaaactgtcacccttagcctgcacctacttaatttgtggctcttggtaaaatcgcagtctatttcgttttaatgtgaatggtgatactaattaataaaagagataaattaatggtttgggggatgaaatgaaaaggaaacagggaggaggaaatagaaaagagtgtgtttggtaagtagataacaattaagtagggagaaaaataaaaaagatgtgtgactctaacattattatttttctgtaaaaaaatgaatggaaatgaatagtgaaaggctagaatcatgactttttatgatgataagtgatggttttagatgtttattggtgtgcttttttgttttctgaaaaggatgtttactgatgatttaaaatcctaaaaaacgtatataatcgattttcctacgaaattaaaattcgcaaaagctcatcagtggattaaaattcacacaaaaaatccgcagaaaacattttctgcaaatttttaagctaactccgcagaaaaattcgcgtctaattttttttttatgaacaattggagaagatcaaagcatatatactttgtaatgagcattggtttgggacgatacttgaaccaattatgtacgtgttttgagaatactattttatacatttttttttcttttgatagtactatatttgttttatacgttcttgttgtttacaactttaattctgccttttctcttttaatattttattaagtttcattatgcccttgaaaagaaaacaacacactttttggtgcttttcgttaaaaaaatacatagctaaatttattttatcaataaagtttttccatgtacgcagttcgagaaattaaaaaagaacaataataaattagagcgcaacacttgttccaatatcttggtagtgagttgagttaaattctagaacctggtgtaccactaatataagttagtattttgcaaatgatagctacaaatgatggatgtgcctaatttaattgactgaatactaataatagagaaataatttaattgaacaaatgactatggcttccatgcaaaggggtttttctacactgttaattagtgtcttagagatcaaagcacatgcataacacgaatggtgtattggtgtgtcattcactatatacagcactaggtgctccctccgatcccttgccttgcccctttgggcattttctgagtcccacatacctaatttaggttcaccacttcactttcatcccttatgaatattaactgaaacacaaaatcttaaattgttggcagaagaaaaattatttaaagtccattgtctctacccaaaaaaaatgtaacagtatgttatttttttagtttttaaagttaattatgagtagataagattaatttaagtgtgaaactaataaaaaaaattaaatcatctatatttagagctcaaactggttttactttatcatattaataaagttaattttctaattttaatttagtgaaatttaaaatcgtaagtcattgattgctgagtttgcaaggtcatgaatcttgatattcattggatggttttctttctcaccattaaaaataaagaataatatactattaagttattgatttaagtgatattaattttaatcttcttaaataaagtttgaggtcaaagattaaagaataataatatacttttagtacggtacaatagtagaagacattgtaattataatattatttttattgagaggataattgaaaaggccaggattaattaattggaccacagcgcaggagtctccaaaatgacactggacctataatgttgcatcggtataataatgaaactgcaacatgatttatttgagtgcgtgatattaaaattaaaccatagaaacatcattgtacatacgattcccttccctcttgtcttcttgttctttttttttttttgaagtggaaatctcggaatataatgcaatgtggtttcatacatggaaattttatcgtggggggcaccgagccactaatatcaagggagaatgttgtccatcagttcgtatttattttgtaagtttaaccaattattcttctaaaaaaattaatangaagttttatcgtggggggcaccgagccactaatatcaagggagaatgttgtccatcagttcgtatttattttgtaagtttaaccaattattcttctaaaaaaattaataccatacacaattacacacattttttaaaattgattgtatatagttggtctatatatattttcataaccggaaacagaaattaaaatgtaaataagtgattcaaagtaagagcaaaacgcaatgatctatgggtgtttgtaatttgcacgtcagttgcagcaatcaaaaaaggtatgtgagagagaaataagtttaagagaagagataaaataatttttttattctttctaaaaaataaacacaaaattactggaatgttcctaaattaaatttggtaaaacagaataactaatttgtttcatgtgagaatatgttaaaatatgagtacgtataatttgtccattcttagataaaacattgggttatataccctcactcacccgtatcaaatttgatcccgatattctaaaatccaatctaaacaactatcaccagatagccggatccacactcggagcgtttgagagttgaaaaaaatttattgaaaaatttactggtaattgaaagttgttaaattacctaattaagttatattatttgataaaattatccattatagaaactaataaatgtaaaatatgaaaatatacatatttatatgatatttttgtataaattttaaattattttattaataaaattaattagtttttgagagtatttataatttttggttttttaattaactttaaactcttgtaattttttatttatagttagttattttaattatatttttagtttcaattgcgatcttttttatattgtgtatattctattattaatcttgtcacatcttaaaatattttcaatcaattttaaaacaaaataaaaacaacataaacttaattagaagtcatatttttattatgttgatgttgattagtgtaatactctatctaaactcaaatatgaatgaaattaattaatgtctgggtaatgtcatggaaatcaactatcacatttaaaaataacttttttttatacttaaaacatcattgactggaacttgaattatttttttatgaaaaatcattaaaaatagatatcaattaattaaaggatgtttttaggatgatatcattcaatattgataaaaataattaaaaattaattatatttgagtccaatattttttgttgcttatattttggtccagagagaataattaatataatttaaaatatataagataaatagtgtaatggttaaataaataatatattatcaaatactcaccgaacatttttattttattataaggttttaatatatttttgtttatataagttcatattttttaattttggttttcgtaaaaaaagtttatttttaattcctataaattgatatttttaattttaattcctgtaaaatattttgttcattattagtcgttgtaaatttatatttttttaattttgatccatgtaagtgtgaacttatgaagattactaataaaaaaaaatttaagatcttaaagggtttaaaattaaaagatacaaacttataagaattaaaaatgaataaaaaaatttatagcgaccaaaatttagaaaatattaacttacaaagactaatttttttaaaaaaaatcttacatgaacaaaaatgaaaaaaatgttaacttactcgaaaaaaaaatatttaacnttagtcattgtaaatttgtatttttttaattttgttccatgtaagtgtgaacttatgaagattactaataaaaaaaatttaagaacttaaagggtttaaaattaaaagatacaaacttataagaattagaaatgaataaaaaatttatagggaccaaaatttagaaaatactaacttacaaagactaatttttttttaaaaaatcttacataaacaaaaatgaaaaaaatgttaacttactcgaaaaaaatatatttaaccctttttattacaatccgcaaaacggcaaaaggacacccccttgttgtagtccatttttcttggattgcttcatatatttttgatatatttgatttagaggagagaagtacgaaagatataaatagaagataaataatttgaaaaataagaaatagagtagaaatagaatgatattttgtgttgtttattttgaggaaaataagtgagaaatagattaatcataatattatgaagttgttcagtatgaatgaaataagaaagagagaattaaactttaaaaaataacattatgtcctagaaaaatggaaaggacagacttggtcctctttttttcgtctgatgcacagaaaaatacagtatgcgggatccactcttttcaaaattgtttctgctctttctttgacaccaaaagcagattattcatttatatctggtcaattgtttccaatttccatcgcccataataaaaattggcttcaagcacaaataatttagagtaacaatacatactcaacaattatttatatattttttattgcattattcattttaactatcactcttctctttcgttatctctcttaacttataaaatttattgtataaactgatctatgaatagcattatccaataatttattcttactgtcccatcttttgggattgaacattaaattatcacgggaaaaagtcaatcttgaaattctttaagggcttccagcagagttcaatgtccttacaagaaaagcgcaggttcactaaggaaaagatataaaaaaataatatcatcaatagattggtgtattaaagaactatttttaaatttaattaaatatataaataaatttaaaatttaataagtaattcaaataaaacattaaaaatacaatttaaaaatatttaatttaaaaatataaaatatgcatgattaattttaaaaataaatttgttaattaaaaagaaaaaaatgattaaagtatgcgattaattaaaacatgtatttaaatttaatatataaaattaaaattttcaaaaataaaattataagaactataaaagaataagaagaaaaagaaacaaggttttacgacttttattttcttcttcttctttaaattatgtatgataagttgtaataacaacaatatggtgtcaaatttcataaaaacaaaaacaaaaatggtggcaaatagggtccagagagacgccggcacaaaactgattggcccctaattgtattttgttattcttataattcttttttttatgcttatattaataattcttttaaaatacctaaaaaagaatcgataagatgtgtgcgtattggccataaatagatattgttaaaaataacgtatgtgaccttgaaatagtatctatgtattcattctatacactgccgtggaaaatatattttttaatagttgcggtatagttagtttctaagatactaattcaatgccttcttacatattatttttaaagatttgatttttttaaaattaatttcttaatttagtctctgaatctaatgttatcaaacttgaagtgatgaattgatcatgaacttagttgaaattatatgtcactattgattggactgataaaataatatataaacttaaatgtgcaataaatataataattaaaatgttataatgagtatatagttgtgatgtaataagtaagaaaaaatcatatatgtattaataatgtaaattttatattatcttcgattattttatgagatgttatcttttaattaaaaaataattatagtaaaattgttaaattttataagaattgtttaaaacatatataaataatattttctatttaatttacaatataagaatttttgtatcggtagtatgttattaaacataataattaacatcgcttgatgagttaattataagtgatacgttaaaatttcattcatactcttctaaattaaattaaaatatatattttttgaacaacaaatcctaaatcctaaaccaagacatatatacccttgtaactttagctagcaccatcatctttatcattttggaatgcaacacgaagctaaaaatttactacaactaattgcttttccttatcacattttctgacgtttattgtgattttatatatttttacataagagaaataatttctacaaaaaatgttcgataaaatatgaagagaacgtgtattaataatttctacataagaaagaaagaaatatattatataaatagcattaccattgttgaaacttgaaagtgggtccatcgtttacaactaaagaaagacaccctagcgtaaagtatttaaccatgacatctacttcaattaacttgaagatgtagttccatctcaacggatttccgtctcaaatataattcttaataacttgctaataaccattggaatctgcagaatatctcgtttagttgggcacaatcctcaaaagcgatgtatttttttaatgaaaacaatgcatgccacaagaacgtttatatatacataattttactaaacaaatcgtatcgtaatacaaaactttattattattataacgtgatttgtcactttttgcttcagaaaaatacttgtacaaaacattaagacaataacataagttgccaataccatacataaaactctttaatgaatcataatgatgaaaattgagagatatttagttccatgataaagagtgtgtttgtgtgggaatttgaccaaacgcaattggcgttccagcgaaaacttttctcgtgtttggcgttttgtgcctcggaaagctaattttctccatttaaggtggtttggacggattttcaaacacactcacagcgagtccgtttcagtagaagtccttccagcagccccccttcccccaaagaaaaattttaagaacaaaaagagaaagaaaaaaaagaaaaaggaaaaacaagtcacatattttattcttatgtcagccaaaaacttgactacctgtagatggggcaataataactagctatttatcacatttcctagctaattgcctattttgttatggaccacactcccacttgcacccatcttcaacaatttaaattaggtaataaacattaagatatcctttaaaatctactcaacaaacagaagaattcaaatctgcaggaaaggtagacccatgtttaatactagctttctctatctctctcccactgggacattaatgttcctatatttcaaaaaaaaaataaaaaatatatatatgatgagcaatgcagccaaaggtgcatcatcttttacgtcacacgaaagcctgtcctacctcttcaagctgcacaagcctttctctttcccagaatgattttttccttttcttgttattattactccttttggactttctatataatactttctatatatgttcccaataataccacattactcatgtgcctggaaaagaagcagcagtgagcacctagcaatagtgctctcaccttctctcaatcatttttcatttgtcaacttttatagacctcgatttgtgtatgcaaatttctttaggacatgtggcctacattagtggctaataagatattcaagaagagacttggaagcagcaattttatagcagattttcctagttataaagaacccttgctgggcatagtagacattgatcagaactcaaaacccattcttaatgatcacaaggacacacaaaaatacaagtaagaacacaaatatcctcttctagctagtacttttctatcttatgtatcatcatatatagaaaagttgtagatggctgaagtatatgcctgatcatttatcaagttcaattctattctgggttggttctgctttctatggttttgttcttctctctatttttttttctttcaatttttctgatattgttttttacttcatgtaagggtatttgttagtacatggaacgtaggtgggattgcaccggatgaagatttgaatatagatgatttgtttgagacatgcaacaactcttgtgacatctatatactagggtattgtcagaactgcttcaggttttctagcatatatagaaaaacacgtttttaaatgtgtataaagaaactgaatctttgatctgacaataatatttttattactgttttccaatccaggtttcaagaaatagtgcctctaaaagcatcaaatgtattgggatccgaaaacaatgagatttctatgaaatggaattccaaaatcagggaagccctgaacaagaaaacacatcaaaggggcaaagatgctaaaaaacaggagctaaagaacaattttcccaataagaaagaaaatccagctaagtgctgtgaagccccacatgatttccaatgtatcattagcaagcaaatggttggattattcatatctgtgtggattagaagagatctttgtccattcattcggcatccaagcgtgtcatgtgtaggctgtggcataatgggctgcttaggaaacaaggtgacccaacaaaccccactcaattgatgttacttttgcacctgatcgaatatacgtatttgttttgtcctatgcactcatacaaatcattactgtcaacatcaattttctataaagcacctaaggcactcttggtaaagagccatgttaagtaaaagtttatcacataagagtttattcataagcttcatgaagcttatcaaaataagctttaaaattattttgttatagaaaatttagaaatgaactgaaaatccttatagaaaagtcataaacaactattaaaagttcaaataaattatgtataaactcttccatatgtcttaattagtgcttattaatagtcaatagtctaaagctgatcgcatcagaattggctatctaaaaatcctaattggggttttttttttttttcctttctgttttacaactccaattaatttgcagggttctgtatcagtgagatttcagttacatgaaacaagcttctgctttgtgtgcagccatctagcttcagggggcagagaatgtgatgaaaagtacaggaactctaatgttgctgaaattttttctcggacaagttttcctagaggccctttgcttaatttgcctagaaccattattgatcatgagtaagtgaagtttgaaaccgtccaaactgattctcaataatttttgcccccttgctttttgtttaataattatggtccttttccaaaaaaatcatgtaaacaaggtgcaaatattaaatacatttatgtttcgtttggtttgttggttcttgaaataaataatttgcttaatgaaatgaagatgcagcattaatgatcatctccggttttgaatttgtcccatagaaatcatgccaccaaaacattaatatattattcttcggtggtttaacattttaaactgaactgcacctacaaagttaattaactttgataatttatgaagaaattgttctgatacatatagtggttccgtgagtaaacaaaagttgtcaaaaaagacaaacagaacagaaaacagtagagagatatatttgcactggtaaccgtaaatgctccctccatttcttttcatctgttcatttaggaaaaaaattatttctatttatctaatcaattaaaaatttaattatcataatatgaattactggcttttcaattatatctttatctatatttaatttttgaatactttacatacacacttatcataaatgagagaaatttttattttttttaatcaaaggagattgtacaagaaagttaaaattaattttaatgtaaataaagatattattacattcatcctctggagttgaattttttttttcttttttaaaaaaagaatattcaaatgacagtaacaattaaactcatattgaccactgaaccatcaaattaataaaatatactatctcccaacttcatataattggttgtactttgaatgatatacatgtattattttagacacctaatcactgctggtcttgtgcagtcatgtaatattgcttggagatctaaattacaggatttctctaccagaagaaacgacacgcttgcttgttgaaaaaagagactgggattccttattagaaaatgatcaggtatgtatgatcaagatttaaaaatcttgttgaattgaatcctttaaaaaaataatctttgaatttgtttgcatcatatttatctcttagaatctaactaaattatattcaatgaaaacgaagctaagaatggagctaatgactggaaacatgttaagaggatggaatgaaggagcaattaaatttgcacctacctacaaatattgtccaaattcagacatttactatggatgttgctatcatggcaaaaaggcagaaaagagaagagcaccagcatggtaagagacaatataaaatccataattagatatggtcacgttcaaaacatttacattttactgttgaatacttattattaaattcttgttggttcttaatttaggtgtgatcgaatagtatggtatggtgagggtctaaagcaacttcagtacactagaattgaatcaaaactatcagatcataggccagttaaggcaatgtttatggcagaagtcatggttttaccagagctgatgaaaaacttgcaaagcttgttcctatcagaaagatacgagcaaattaaaactccccttgaagtttccaccactgatgattttgtaaatagaaaacgatcaagcttccggttgtgaataatttgtgtgattcaagctaggctttaaattgcgattgtgatcaatgttgcaattttatcacaatcttttgtattggagaaaaattgcataaaaatgtggcctttgcgatctctaattacaattagagactccaacaaccgtgacattgccatcaatattgtggttgcacgtgttttctaaaaaaattgtgtgatatatgtaaataaatgttcaattttacattcggaaaaaagaaaaaagagctagaagttcagaggaaggaaattgagaaacttctaggagatgagatgagatattatatgtttttgttgctgatgagtatacagtgaagttggttgtttttgaattattatcaagtatatatgtaatgtgacagaacatggaaatatgtcaaaacctattggaaaaaaaaaaactataatccaaattaataaatgaaacatttttgtagattgctacttgagaatcaattaaattatagaacaactacgcatccaaaatggcaaaataaattatatggcaattattgagctagttaaggtcctcaatattgttatctttgacaggaagtgggaacatcacctcttatcctgtgtgcatgaaagagcattgttagataatttttttattgatatgcgtagaagatatcattttataaatgcaactagggagaataaatgagctaagtggtgtttttctgaccaatggtatattaattgaggcgtgcacttgctgagggaaaacaaaaagagttgtgtaataagacttcatctgaaagggatcttgaatcgtgtcctcactagtccttgagatgctcgtctagagggtatgctatacagagccatcttcatgaagcacttgaaatttatagtggttgtcctgtttcactttatatttcacttgaagttaaattgcacggatggaggttacaaaatcaaatttggtaggaccccagtacagaatcacttatgctaacaatttttaattgatctcatattattttaaaatttattcccttaaaaattatgtattgataataagacttcttcatttgattctttcaacaacaaaaaaagacttcttcatttgataaataatattatatatacttttttatcgatatcatttgattttaacttatatatttttttatacatatttgaaatatattttataagatatactttaattttagttttatttttctttaatttaataatttaactactcaaaatgctgttaaaattgatattttatatttccaaattaatannnnnnnnnnnnnnnnnnnnnnnnnnnnnnnnnnnnnnnnnnnnnnnnnnnnnnnnnnnnnnnnnnnnnnnnnnnnnnnnnnnnnnnnnnnnnnnnnnnnnnnnnnnnnnnnnnnnnnnnnnnnnnnnnnnnnnnnnnnnnnnnnnnnnnnnnnnnnnnnnnnnnnnnnnnnnnnnnnnnnnnnnnnnnnnnnnnnnnnnnnnnnnnnnnnnnnnnnnnnnnnnnnnnnnnnnnnnnnnnnnnnnnnnnnnnnnnnnnnnnnnnnnnnnnnnnnnnnnnnnnnnnnnnnnnnnnnnnnnnnnnnnnnnnnnnnnnnnnnnnnnnnnnnnnnnnnnnnnnnnnnnnnnnnnnnnnnnnnnnnnnnnnnnnnnnnnnnnnnnnnnnnnnnnnnnnnnnnnnnnnnnnnnnnnnnnnnnnnnnnnnnnnnnnnnnnnnnnnnnnnnnnnnnnnnnnnnnnnnnnnnnnnnnnnnnnnnnnnnnnnnnnnnnnnnnnnnnnnnnnnnnnnnnnnnnnnnnnnnnnnnnnnnnnnnnnnnnnnnnnnnnnnnnnnnnnnnnnnnnnnnnnnnnnnnnnnnnnnnnnnnnnnnnnnnnnnnnnnnnnnnnnnnnnnnnnnnnnnnnnnnnnnnnnnnnnnnnnnnnnnnnnnnnnnnnnnnnnnnnnnnnnnnnnnnnnnnnnnnnnnnnnnnnnnnnnnnnnnnnnnnnnnnnnnnnnnnnnnnnnnnnnnnnnnnnnnnnnnnnnnnnnnnnnnnnnnnnnnnnnnnnnnnnnnnnnnnnnnnnnnnnnnnnnnnnnnnnnnnnnnnnnnnnnnnnnnnnnnnnnnnnnnnnnnnnnnnnnnnnnnnnnnnnnnnnnnnnnnnnnnnnnnnnnnnnnnnnnnnnnnnnnnnnnnnnnnnagtggtttcttgtttctgcaatgtgcttcatcaaatatgaaaatatcaaacatttgggagagtctgatattactgtataaaattatatgaattattaattaaaataatcactttttattagttttttaataatacaaaattgacaaataagctattattttctcttaaaataaaccaattcaagtcatacccgtatatatacaatttggaacattgctatttgtttctctattttttgttccgggaattctgtacctacacacctgactttgcaccaatagaaattatttatgggatttatctttacttttagaaaaaaccaattggataaattataagtgatgattagatatgtacaagttgatttcttattttcggatgttcaagttggtcaactggaggaaaatattttcttaggcagggatttcaatgaatgttttttttatcagaaaataacttgtatttttttttttgaaaaggcaaaatatactaaaacgatcaaaactggtacaaggagtaccagattaactgaaagtcatacaaaagtatttataattacgtcacaagctctctaacttcccaagtatatggcactaataattaacattaacgagtgaagctatgccaaaagataatcccgctcaaaatctaacacctgcagcatccccacaaaattagaaatacattacaattgctgcactatataaatattaatgacagatttccaacccaacaatgccacttaacgttgatcaatacacgagatgggattagaaatccacgaattcaacgagtaaacaaaccctcttttgcggatccttagccatttccatgctagatactgtgcatgagcagataacttgtatattaataatatggtcaaggggatttcaatgaatgttagtagagatagggcaattttgttggtgtttcgaagacataaactaggacaggctattttttattatttctttgtagcttatgatgttaaaattatgaaaacttgtttaaaaaataccttatcacttataggactgaaagttcaagattgcaaattactttctttatgataaaaaaaatgctgataaaggggtttgtaagtgtaaggattgcaaggtgattctgcaaaagtttttttatccttgatgttctcttagaaaggcataaacaaaaaaatccagcaagttaccaatctaaggatcaggtggtggtaacttaagggagataaacttcttacttttaagtggaaatttttgaaggaaagtaattggaaaataatttaaaacaggaggttgctaaagataaggaaggttgctaaataaattttgggtgaatcaagaagataagaaatttttgtggtggaatgaaaatgttcaagaaataaaaagaatgctttagaatctttaatgtggtcaataatgctgaaaattgagtaaggtgttgaaatgataggaatgagataagaatagttgtgagtgaaacacaatctaaagcttataagaagttttacaaatatcttggaacaaagaatgaataatgtaagatatataagatcacaaaaaaaaaaaagaagaaaaaatgagagatttggatcaaagtgtattaaggatgaataagggattttttttattatcataaatcaccatttagagaagagatgggagaatattatttcataagcttttcaattaacgacaagatcgactccatgtatggaatgactagaaatccaaaaaagattaacaaattaagtttgtcttattaccgtagaattcatgaaaattaatttgattttatttggagatggtttatgttgtgttgaacaattaggcaggttgattaggtggattcaaccctttttatcatttttatttttgacaataaagtaaatactgaagtcaaaggtaagttttatggtatgatacacgactgactatattttatgatagtgaatattggatttgaatgggataaaaagaaaaatctaggaaaaatattaaaaaatgttaattcacttctttttaacatagaggagttgctaccagcataccacaccaccttgcacatccataccaaacacgggtagatactctacactcaaaacacaagtgtgaaactaattcatcgtgctttttacacaagctaggggcataacaaatcacccccccgacatccttaatgagacaactttgttgggttgatagtgaaaataacttgttgtatttaatgcataacgcgtcgatttgctcccaactaaacatctttccaaaagaccacatcatttcctttcccaagcacacaccccatgttgatccagaaccaatcctcttgagagtctgtatgacaagttgatgcaacattcatccaccagcttgatgttatagggtgcttcaattaatagatcttcttcattagcagctctagcttttataaccagcacccaaagggagtccttctctctaacaaatcgccacatcaaagatttattgaaacttcccatattcctcaaccccagctcaccactaccctttggaagacagacctactgtcatttaaacccaacatatattttagcttcctagactcctcgcatgaatacatgctagcatatggactatacaataattcctcctaattaagactccttatatatctctatctctcttttttctcttatcacatctatcattattattattattaattataacaagaatcaaattatattagaaaaacaacctaaactatatagaattaatttaacaaatttatcaaccctaacttggaggattttatttacacagaaaaaaataaaacaagaaagaagaagggggtaaaaatcatatgattgcttaaacacacacacactcccttcaagtcccaagagctcttggcttacaaaacactctagaaaactttctttaatagttacaactaaaaaatatgccaaaagtttgtaaaaagtcttatgctttccattgttggaggtgcatgcattttgactttacatcatttgttcatatttctccttcagactatgttgcatcttttgaccaagttgcttcatttgtgtgggtgatcgagcataattatatcgatgtctctttaaagtactagtacacaatttataaattactttggacttgacttctcatgcatattattgcttaataccatggattgtctgatcttcaaaaacccaccaaaatatggataaatttcctacaccttaatactttcaattaaccatgagagacttttttatttatttatccaaaccacatttcatttaatactctccttttaaagatcttggaagataaattgattaaataaattgtaatcactctcattgtcattaattataagatacaattaactaatttatgcttattaagaaaaatagataatttaattatcaccattaatttttttataattataatattttttaaaatttattcttaactttattaaaaaattagttcatcttgtctaatctccataagagagaaaaaaattaaaatattatagtaaaaaataagtaatacacaagagagataaaatatagttttataataaaaagattaaaacgttattgattaaaatattaattctaatgtatatatattatgccacgagttctacaataatcaaatggtactttatattttccaaattcgtataaaagcatttcagtttcaatcatatgatcactctacatagacatgaaactcctagaaaaattgaaaaatttgatgtttcatcttatgggtacgtacatacacccacatcttcctacaatgattatcaatgaagctaaccaaatattgagcaccaaaaagtaacctttcagactccaagatttagtttcatctttttccatcttgaattacattgaacaataactccccttataaccatatcagtaataccattgttaaggaaaataaggggttaaaatattgaggacatctctattttttttatgacttttgaggacatctctataataaaaactacgagtaaagtatacgaataaacttattattatattcaacttaaaatctaaagacattaggtatttttttctcttacttatatattaattttcttattcatatctaatgagtgactacctcacactaactgaaaaccaaacagagcataagatgtatacgttatattcttcaaaaaaaatgtatatgttattaggtatatcccacaactgctagtaacttttgtgctcgtttatttttaattggattaattatactttaatttatgtataactttggttcttttaattataattgtttatatatttagcctgtacagattctcaactattcaaactaatttccttccgcctaaagtttcatttaataattaacagaatataatggggatacgagatatatacttgcaaagtaaaaanaatgtatatgttattaggtatatcccacaactgctagtaacttgtgtgctcgtttatttttaattggattaattatactttaatttatgtataattttggttcttttaattataattgtttatatatttagcctatacagattctcaactattcaaactaatttccttccgcctaaagtttcatttaataattaacagaatataatggggatacgagatatatacttgcaaagtaaaaataataatttaaataaaaatgaaaatacctttaattacattttattatttccatccaaagaatatagaacaacaaatgtacgagtaatatcctgctaaaaggaaaagaaaccttgaaaagcacatccacaagtgtctttaaaggtttgtccaaaggtgagactaccagggacttggtgcaactttttaaaagataaattaaaaacaaagaagaatttggaatggtgcatgatgatgatgatggagcttgaggcacacttccttctcatagcaaccaaaggagaagccctcatgatgccccacaaaaataaaccaaaacaattcttaaatatcaaaagatatatatatgtaaccatatatagaaatatgatttcatgataagaatgaaagaaattagagtttgttcaagacatccttcatcaagctagggttggcagtatgaaattcaatcaactcattcagtgtaatgtatccatcaccgtctttatcaatctctgccattcgacgctcaacttcctcctgtgaagttaagcctagcactttgagagcatctgcaaactcagacaaggagatattgccatcgccattcacatcaaagcgcttgaaaacgcgttcacactcttccctttcactacccataacttttttcacgagaggaattgaatgtcatgtactgaattaatattgaaatgagtgagatatttatttaagaagtaaaaaaacaaaaaacaaaaacaaaggtgcctctagctagagactcggtcttgatgctatatgatcggacaacctttggagttttaccacatgcaagctcattcgctggaatttgtataaccatattgatttcttgtctagctccaacttttctttcgggtttctatgacaaactattgctcgagattcatggactttctttagcatacttcataattaaccaattttagttttgtatgatttttttttattttttttttgtgactggtactttgtacatatatgaacacatacaaatttggaatattaattcttttgtgtgttagcaacctatatatgtgtatatatatatatatatatatatatacatatatatgcaccttgggaggctaaggccagtttttagaattttgaaggatatatgtacagatctagatcactaattcataatggagtagcttgaaattgaatagattgattggatatgatatagctctattgaagaaaatgagaaaaccattagttaagagagaaaatgaagaaaattaagtgacaagaaaagccaaagaaaagaaagtgaaaagaggtctacttagaatattaattaggaaaaataattttttatatccttcgggtgtatgtggcaattaagagatggaaactaatattttaaaaaatcttgaattgagattgaaacaatattaattaaataatacataaaataatagtgttaaaggaacataagaccataactttaaaatactaaaaactaaaacacaatttcataggttcttaacatttaaagtatataaaaaattcaaatcaaatatattacaataattacaagttaaagtttcaacaatacacaaaaacatttattaataataataagtttacattcagaataaaaaagaaatgaaaaataatttaggtggattttcattttttttaaaaaaatcataataattttgtattaaacaattttcgttgacctgctatagacttttttttttcgattttcatcagtttctcaattttgacatttttttttcgaccgatttttcttcaagtcgttttgtggtttatttgaatcgaccatctaattgattcacccatttttcagttcgaccaactgatttgattcgattttaaaaacttgcataaaagccataaataataaattaagaaaagaagttagaaatacagataaagataaaataaataaaaatgtgaaaaaatgctaatagtgtaagacttgtgttaattaggtcttattttttacttttatcttaggggattaaaattgttattttattgttaattatctccatttataaaactagttaaatataattttgttccttcaaatatagattcatattagttttagttgtccaaaaattattttattgcatttggtccttgaaattttcaaagttttttattttaaatttttcggttaaaagtttgtaacaataattgcttcaacatcaacaatttcatttctaacaataacattcagtatgccctgcaaaaatagaaaaaaaaaaaagaagaaaaaacatcttatggctctagttttctcaaacaaggagcatatacagttaaactcatattatctatgatgttggtagaactgattctaggaagtaggaacaaatatcaaaaggtgcattgacagcaaaaggttgaatctcagtaatattgtctatgaaggtaacttacatttaataaaaaaaaatatcaactaaattaaatactgggtttaaaagaaaatttaaaaaactttaattttaagaaataaatacaaaaaaatatttttaaattatttttaatatatttttagaagtctaaaatcaatattgataaatatttggaagagcaaaattatattttattttattttctcattgctgataagatgttcaagtttagagaagagaaaaataagaaaatatgttgttgaaaaaataaaaataaaagtactgaggcatgaacacacataccacgtttcaatggttcaacttgctatagtacttgctgtggaggcagcagaacagggaagtgagaccggtggggtagcgttgaacgagtaatggttgagtgtgatgaaaacgatgacgaagcaacaatgtcaatgtcaatgtccatggaccctcgcgcgaggcacgcacgagccataacatcacacgccaaagaccgcgcagtgtggaacaacctcataacccactactccaaatccaacctctcatcctgcgctgtctccctgtttcacagactcccttttcctcccaacgttgtctcatggaccgcattaatctccgcgcactccaacacccccctctccctccgccacttcctcgccatgctccgccacaacactcttcccaaccaccgtaccgttgcctccctcttcaccacctgcgccgccctcactgccgtctcttttgccctctccctccactccctcgccctcaaactcgccctcgcccgccaccccttccccgcctcctccctcctctccgtctacgccaagctctgcatgcccctcaatgcacgcaaggtgttcgacgaaattccccaaccagacaacgtttgtttctccgccttggtagttgcactcgcccagaattcccgctccctcgacgctttgtcggtcttttccgacatgaggtgtcgcggttttgcgtcaactgttcacggtgtttctggtggtttgcgtgctgcggctcagctcgctgcgttggagcaatgtagaatgatgcatgcacatgcaattattgctgggttggattcaaatgtggtggtgggtagtgctgtcgttgatgggtatggtaaagcgggtgttgttgacgatgcaagaagggtttttgaggatagtttggatgatatgaatattgtggggtggaatgcaatgatggctggttatgcacagcagggggattatcaatctgcttttaaactgtttgagtctttggaaggttgtggacttgtgcctgatgagtatacttttttggcgatattgactgctttgtgtaatgctggaatgtttctggagatttatcggtggtttacgaggatgagagtggattatggtttggaaccgagtttggagcattatacgtgtttggtgggtgcaatggcacgtgctggagaattggagcgtgcggagagggttgtgttgacaatgccgtttgaaccagatgctgcagtttggcgagctttgctatcagtttgtgcgtatcgtggtgaggctgacaaggcttggtgtatggcgaagagggtgttggagctggagccaaatgatgattatgcttatgttagtgttgctaatgtgttatcaagtgcagggaggtgggatgatgttgcggtattgaggaagatgatgaaggataggagggtgaagaaaaaaggtgggaggagttggattgaagtgcagggagaagttcatgtttttgtggcgggggattggaagcacgagaggtccaaggaaatttatcagaagttggcagagcttatgggggatattgaaaaattagggtacgttcctgtttgggatgaggtgttgcataatgttggggaggaaaagagaaaggagtctctttggtatcacagtgagaagttagctgttgcgtttggagtgttgtgtggatctgcaccaccagggaagccgttaaggattgtgaagaatttgaggatttgtaaggattgccacgaggcttttaagtatatgacaagagttttagaaagggaaataattgtgagggatgtcaacagatatcacagatttgtgaatggtaactgtacttgtagagacatatggtagcatatacatgtttgaggcttgtttctaattataagtgatgctgagaaagaaaactgatttttccccattacggtaagtctttttcttactggactttctgtattttgctttcatgtttttgtttccattttgacttcttttgagttagatcaagtttaagatatttcattgcaacctttctagtgaattcagataggtgaacctttactctgaaaattttagtatccaaatttctcttacaaacaaggagatatatttggaaattgtgttattcccacagttagtttgttgttttcttatggttattgcatgagatgcagatgcagttaagatggctgagtgggcggaactccacttaatccacttgacatttgatgtttgaataacattctgaaactgtcgaggtgtctaggtgagtacactttgtgtctattgtatctgaaagattgcttgtgagacatgctatttaaatcccgagcttgttctttttcttgactgaacaatatattaaatagggccaacgattgctatacatagttaaagtcctacctatggaaaacaattatgcaaaaccacaaatgcaaaatttgttatagcttgtctcaatgtactcccattgaaaagttcaattgccaaagttgatggaaaatgagggatgtgaggagccaggaggtaggcatacaaaaaaaaaaacgccgcatctagttatctgtttaaacaggcaaggaaaatttatagtttctttatattgttttcattctttgactttgaagccacttaaattcatgaattgctaaattctatcgggtgaattgatgcttcaatctcaataatcattggtaaattaatgcattgtcattttatcagtgtaccatatttggttttttgggtggtcctaagtaagtagtattgttaaaatataatgaattttttgtagaagtagaaacgtaggattaattgggtcagggttttgcatccatcgatatatttccaccttcatttaggctgaaggaacctatttgtacactgtacagtcacaatgtaaataccgtccaagtgagttttgcatccaacactttgagtcgttacaacaacctaaataaggagccatttttaaggaagctagttaaggaacatggtttggtaggatttaacaaataaaatgtcctcgatgtttaacttcgcccaaaagactcttgagtccaaagtggaaaagtagatccagttagaggtcaagttaataggactcagatgtaagcagattactattctaaaagaaatgcttgtaacacactttttattattacaaacaattgtaggtcacatttcttatttaacgagttttactcataattttatagatttctgtaaattctaatcaataataaagagtgtattgtcaacactttttactctataatttaattatggatagagttgagtttgcgtttaggaagtatatctgtatcctaagcccacccaactccgccatttacattttgggggaaaacttacctgaccttaggacaaattaagtatttcctgtcaagtttggggtcggttggggccagtgccctttacccacagctttgtcagtttataatttgaataagcaaaatttcaatgtgttcttgttaagctttattctataagaaaccaaacacactctaagtctaaggttgagtgccatttaagccattacaattcacaaataattcaatgccatagtagcgtcaatcaacatgtttttaggtaaatcaggatgaatatatatgactgaaaatggagaaaaatcaaaagcaccccgtattttcaattttattaaatatttaaaacttcgtcttactttttttccttgtttccagttttaatcacttgaaagactgcatgaattcatgcatcaaatacagagagattggggagaacgaagtggagaaagatcgcatgtttttggaatcagtgaggaaatgcttatagaggaagaaggttgaggctgccattgtcaaaacacgccctcataacacttttaacagctgaagaagtgaagatttcaacaccactagctgcctttggggaacgtattattcattcattggaaaattcgacagcttatacaaaattcaaaaatcaattcatacttagcataaataattaattgtgttggcttcaaagggtaaagttattgaaagatacaatatatatgattgatattctgtcatagatgttactgcagattactaccataaaatttccaaaagggacaattgcaatgaactctgttgaggttagcggtaaatacacctaaaccctacttgctaaaatattatacatatctttctcatcttatatattgttcatatccgttatttaaaaaaaaaaaaaaaaaaaaaaaaaaaaaaaaaannnnnnnnnnnnnnnnnnnnnnnnnnnnnnnnnnnnnnnnnnnnnnnntggaatcagttcaaacgatcaagttactttggcagtatcggttatataaccaactagcattgaaatccatgctctgcacgaattctaaagaaaaaaaaagtcaaaaaaaaaaataattgagtaattgaataaaaaaattgtccaatcaatacatgatggtggtttgacagttttaataatattattgattatataactaattatgttatatctaaaaccaattatataatcggttgttggataaataattggttatttaaccagttttaagaaacaaataaatttaaaagcagattttattttatatattttctaatggagtagtttagtcattggttaagttgaaaaaaagacctttctaaaatggttctagcaaaatttcaactatatcattaacttagctatttgttttctttaattagaatcaaaatattttgaattgcattttattgcttacaggttagagtcatggttggaacaatgaccattatgccacgtttttttaaaatattttccagaatgtcacgtccaggaaacaatttcctacaatgccacgtgggttagttcgttgggcttgtcaacgaatttggtatgctgacgtggtgggtgttaatggacacataattcgctattcatagctgccttggaattttcggtcaagccacgtgtcagcccatgcatatttggttatgagtgatagcaaaataggtgtgggtatttcgctttaagtgctagcgaaataggtgtgattatttccccattataaagagaaaataaaaagattagaggaaaaaaaaagaaaaaaatgaaaaaaggaatttaagtaatttgagtaatttgaaaaggcaattaacaatatatatttttattatttgagtaatttaaaaataatttaaattttgtagtttaatataatttaattaattttaaaaatagataaaagtagtttaactttattatttaaaaatgcaaaggatactttttgaatatgatttaatattttttgtaaatattttaaattatttgattaagtattttagtaatttatactataattactttgaattacatttaatattttaattaattttataaatttttgaagtaatgttaaaatttaaattttgatagattgattgttggatgaaaatattttggtaacaattttaacttgtaaagcataacataacatatatttattttgattttgataattaaatatattgattttgttgatgaatttttacaaatataattatttttacttttgttaacacaatgtgataattatttggggtatattttaaaaatattactatttaaaatttaagatttaaaataaaagattgaactaaacttaataaaaaggggtgtaattagccattttcaatttttatggataaacttattaaatactggggtgtatttagcagtgtacaccacttcaaagccttcaggttactcaagactttaatgtcatggaggggtgcagatagcaaatgagggtgcagatagcgaaaaattaaaacaaaacgaaaagtcgtatataagttacaactttaaagtcatatatatatttatgactttaaagaaaaaataaaaaatataaattaataattaaaattatatatttattaaaatatttaactatccaatttattaattttcaaacaatctaaaatttaaattttatttttcaaattaaacttacatgttattaaaaaagtatatataaatttatttgtcttttcaaattactcaaataataaaaaatattaaattaataagaaatttttttaaattatctttttaaattatattaaattaaataaataattacttcaaatattatatatatatatatatatatataattaaacacgtttaaaattatgttcttttaatttaaagtcattataaatatttaaataaattggtatgtttcatattataatttaaagtcattataattattttatcatcctctaacctaatgttttacatcatcctttaacctaatattttaaataataaattttgaacaattaaaatacaaagagcagaaaaataataaaagtaaaaactaataggctcttgggaggaagtggaataatattgaaggaggaaagtgagagtgagagtaaaattgagggagaaagtgatagtgaaagtgaggtagggttaaaggaggggggaggagtttatataggggtgggccaactggacctaattcgctggatccgcctgtgaattacctagttcgctactactccttgcgtgatatgccactatgatgaccgctctgcccctccaatacatgaatgccacgttgcgctgcctattttgctcagggtcccagcgaactaactcacgtggcattgtgggaaattgattcctggcgtggcattttgggaaatattttcaaaaaatgtggcatattagccactgttccatcatggttagggactaattaattaattataaggaaaggaaaaaagtgctttaagtgaagattaacaaaaaaaaaagggagggaaaggcacaaggggggaataattgtgattcttctttatattcttatgcattagaaacaaaataagatatggtaataacgttactattttgccgattccaatcaaaatatcctcatctcaaataaattactcatccgacattgagctgaaagtatatgcatgcttatttctaatcataagcatctgctatccagaatgatatataaaattttatagtaatatagatgatattaattgggctatatcagccaaattctcaatatatatctagagcaagctaggtccttttgatagcatctctaaaaattatatctgatttcttctcaccttaatcagactatcttccctcatatccatcttttgcaataggtttctactttctattactcttctcctcaatacatggactaaacaagagtttattgtatctttttttaataaaaaaaagataatgtagcaattgtctataaataacttttccaattgtctttgatcttacttgcaaatgagataatatactgatttaaaaaaatactatatactattatattatatagtagctggcaattaatatgtctttatggtattatttggatcatgtgcatttataaatgacaattcattagtatatgtatgcattgacgcagctctgacattagccgagttattgtgatcttgaggtacgtcatcattggctcattgctttgctagttgtattttaagcttttccggttcaatatttttttgaaaaaaattctaataagtttatggttggtgaatgaacttaatatgtatgaatttcaatagttatatcatttttaactttttatcacatgtattataagacaattaatgaagtcacaaataactatactacccgttcaaataaaaggtatatgatgtaaggctgatatatttcagataaaatataattaatagaaattctaaatatatatgatgatttgatgaaaaccacgatttgtttcttttgattaaaaaaaaacttttcgtaacatttataatttctctaaagataaatgccaccttctttccaaaggaatgcccctttttcttttggaaaatgttactagatggtacgaaaaattcttgcacaaatagcttgataaaaagtgtattagcagttctgttttctttctattattgtccttaattgttattttcagttgattttaaatactttgttagtgattttgagaatttattaaaatgtaaaagaagtttcgaacattcttgttatgcacttgaggttttcatccagaattttatttagtttttaaaattttaaactcgaaagcaatttgtaaaattgtaaaaagaaacaaaagacttattcataatacttttacattatcattccatcgcaaatcacaatgtatacaagttttttgaagtgcgtagctttttctctcaaattataatatgtattaattaaaaaaaacattacagtataaaaactttcaagtgcagagtaatttaatcttttatgagaactactacaaacaggacatccgtacgttcagatattaattaatagaatgacgtgagttgggcactaaggtttgctggccatattgcaatctgatatcaaaagtaaaaaagaaaacatgctacgcgtcaaaaaaatggaagagatcttactgaccaaatctcataaaataattcgttgaagcataatatagatttcattattttacgataactaaaacaaaaattattcatgttacataatatatatgaacatgaacatgtttaatttcataacatggattgaaaacgaagtttataaatggattgaaatgagtgtgttattttggagttgcggccagtgattccaattttccttctatagtcagttttccaattgtatttgtttttatccagacgaataagtttataagtattttcacttttaaatatttatttggataaacttttctaaaaatagttataggagaaggaaaaaaaataagtcttttataaattaaaatgagttatttattaactttattagttaatcattaattaatttataaatgtattttattttttaaagaaattatataaatattttttacaaattaattaataaaaatttattttaatttataaaaaaatatatttaaatttttttattatacttaaagaaacttatctaaatatgcatcttcttattgactcaaactttagatagcaaaatatggtaactcgcataccatcataatgtagaataaaagatcttttttaatatagtgagtaaaatatcggttacataagtacatatccacatcaacttttactatagaaattaaggtccagtattagagtttctgattgataaactatatacaacaacctactgacataattaaaggatgctgacccatcagatagttaattttaatcttttaccaagtcaaaacttttaaccctcattttctccaagtgtgacttcccattaagattgcgtgagaaaaagtctttgaagtaatcttccatcaacatgcttttgaacaagggtgggttctcagaatttaacaaacttttcacgggcccaatctctgcctcaaatttggggttgaagaacatagcaatagaaattctctccttctctttgttcactgcagccctatgctctatgctggtataggccccattactaagaatctgcaagatcaccgacagcatgagttatggatgaggaaatatatagtgagatactatcatttataaataagccatgattatcaactacctttccattaattaggtgttaatgcatgctgtttcagtttcaggccttgatatagaaatgtgaatacctagtacgttttgtcagtgtttatgacttgtctcatgttgttcttaatgtaaatacaataaaaataaagatggacaaaaataacaagaaataaaataaaaggagttttctttttagtttcacatataaaaagtttctctcctaaagtagagaaaatgttcattgtatttttttgttttactttttcttaaattaaatattttttgtaatgtaagaaataataaataatttcatgttaagaaaagaataatatggtacaaattttatttttttagttaatttaatttttaaattagtataaaaggctttttatacaatttatttatgtttcacttactcttctacatctacctctaaagcaacataatttctttatttctttatttttcatgtctatttatccaaacaaaacatcttttattattttatttttcttttacttctatcagtttttctcttttttcttttctctctatttcacttctaattcaaatacacataaatctaaacttaaaaaaaataatttcattaaacaaattaaggtaaaattttttgatcgataacatatttaaataaaaaagatcacactttagactatttaaaaatattttaaatatgatagagttataagtttatattcattatttctgtctttgagctcaagaaactgtttaaagataagtttgtcaatctattttaaagattttattaaaaataaactttaaattaagcaaaaaattattagttttgaaaaaaaaaacttaaactaaataaaaaaaattaaactcgttttaaattacaaaataaatataaaaatataagctgttttcatttatttgcatcatccatgatcttgacgtgacgatgttaaaaattttgctttatccatttaaagcataaaaaggtttgtacagtaaccggattaatttattggacatagtttaagttagatgcacaaaactagacttatgatatatatgacattctagggctaagttcaatagaccacgtgctgaattaatattagaaaaattgaatgaaaaaggagagaaaagcatgacacacctccatgatgtccccaacgttaattacaaaagcatctggaagaaaggtcacaggaatccaaaccccacctttctttatctcaagaccatccacaccattgacctggtgaaggatggttatgcctgtggcatcagagtgcggggtgagccctacaacaagctctggctttggacatggtggatagtatgtcattctcactgactgcatgccatcatcaaaaaactcctccacttccttcatctccatgcttatggcttttcctaataaccccagaagtgctatacctagtttcctcaattctctgaagtatgactccaaggtatcccttcacaaatatatatacatatctcataaggtatatatatacataaatatctgattacttttggtgttagttttccaatcagaattgatatttaatgtaaatcttataattattaattatacatacataagcatacaaattattatacatatctcataattaaggtatatagatatatacatacatatctggctactttcatactgttctccaatcagaattcatatttcatcttaataatttacattgatattgaatgtaaatttttattacgtacttgaattatcaaagtaaaactctgaattctaattagaaaacaacattaaaaataaataaggaattgcatataatttttctctttatttattgagggtttaatagaaaataaggaaattaagagagagaaattaatgaaagtatatacttcaatgatgcagggagctcagggagaagatgtggctttcttctttcaagggggttgatcaccatgtagaatctgtccccccagtcaagcttttgatctttacatcttatcacagttccatagccttgaacatctcctggtcttatttggtacttctttttctcttcaatgggaagcttgaagaacttctcaatctcaagtttcagcgtctccagcagttgagagctaacaccatggttcaccacctgcataaacaaaacagtagtcttctcatataagactaaaacacaaattattcagtagttaacaattaacagcaatgactaattaagtaattatattaattaattaatgcaaatggaaaagttatcactaattctatatttgaaattaaggatataatatatatatatatatatatatatatatatatatagtttgtgaatttaaaatctttgaatttcaagatcatttcgttatttacagacatagggtacaaacctgaaagaaaccccaatctttgcatgctgtgaacaacttgtcaagttcagcatcatctatagcattttcatgtagcaaggctttgaagtcaaaaacgggaatggttggcaaagtggtttcatttgatcgaattgtaggttcttgtgggcaaatatacatttctggtattcccatttctggtttcttgggtatgtccatcacgccaagaacacaaccagagctcccaaagacacgaacctgctgtgatgaagccattggtaaattaaattaaggtacaatgacaacgaacggtgtgattggtatttatgcagcaagaaaatgccgtattcagtttggactcgttcttggaggttaaaaaagttattaaaatgtggatatatttgactatgacgacttaaataattaatttttacggccatgatggctatttatttgccgcagtggaagaacttgtttcaaatgtgcatatgtgttacgattgcaactaatatatatccaacactgtaggttatgtatttgtcataattaatgtatttcgataaaatttagttgaaggatcaactgtcttttattttatttttatccatcacattgatttagagtatttattaattttactaataattattctatcaaaaaatttaactgatcattttttgttaaatttcttttctcaatcatatttttataacaaaatttaaatccaaaattttatttaagaaaaattggttcaattaataccacttgaattaattacttatggggttgatcaaatatcttttaatgatgtgattgcaagtcgttaaattgacaacacctacttggcagcgatcatttaaattaaatttggaattgcacttctagatgttatgtttcaggaaattaagtcctatgagaattcaattacattgaacatgcatgtgtgtgtatgtgtaagaaatgatcaatcatagatatacttcgtgaaaaaggatgatatttacttttcaacaactcggcttgttatgtagatttgtcatatatagctgaaaactcttttgtttttaaatttctttggagttttcgaaaaaaattccttctagtatttccttgactagctaaataaattgcttggtacaaacacggtttgcattcagactcaataaacaaaagcagaaaattcttgaagtttacccgaagagagcatgcgcaattattatacaatttatataggataaagatggattagttttcccttagctagcttattgcagaatttatagcaattaataaccattaattttcagcaagaaaacacaaattaaagaggtaggtgaaataccataaaaaaagtgaaataccattttagagtgtattggggtgaaaattaagaagggaggaacaaaaagaaaaaaaaataaaaaagaggaaaatatagaagagaaagtgattgtataataggacatgtcctaataagcaaatgaagtataaaagagatatagaaaaaaatgaatatgtatttacaagatttgtggataataattggacatgctttatttaataaaagtatctatataataactgaaagtgaaaagcaactgattttatggggaaaaaaattacgtcttttttaaagctccaaattaattaaaatgtgaaaacaatttttttggggactgattggtttttattttcaaaaactactgttttcattccaaatgcaattaataaaacaaggtttgcttaagcatagttagtgaagagtggtatagtaaggcatgaaataaagagagaaattaaaccagaaggaaaaagaaaatgacaaaaaatctttatttatgttttttttaattaaacaaggtttttgtatattaataatgatacttttttatgataaatgttaagatatatatcaccaaaatttacagtgaggtaaaagttcggtaacattaaaatatcgaattaacataaatatttacggtcggcgccgttccaacaatcatgcatgaaatgaagggcattaggcacatcagtaagttttacgtacaaatggccttggtaagccatgataactaattacctatagtaaaattaaagaaccgatgtccaatttatggaccaataactagtaagatttgacacttttaataatgatcttaagaacagagaattaacaatgaaaaatatttgtggtttataaaaaaacgattattaaagtttgaaaatatcagttaaaaaagggaattgaagaataaaaaatctccattagttccacctcaaccagattgcaagttgttagcatcaaagatttgatagctggatgcatgaagcaaattgaagctcatgcctttcatcaatgaatgctgttttagttgcaattatttgacttgtagccttagtggatacacatgtacatctacaaaacgtaattgtccccaaattaaattgtaggctttctttctaaagacattctttaagaaacttaaaatacaaagtttttttttattggaatgcaaaaaattaagttgataataattatattaatattctcctatagtttttatattaaatgttttcttcttttaatttcttaaataatatcataagagtactgattaacaagattattttccatatatatgatctaactagctatcacctctcaacatggtgttcaccaaatttctcacgacaattgcacccccacaaagtgagtcgctagtggccactaatggtccccaagatcagattgctattctcaatcatgcatctccattaattacttattatttgtttaaaataaatattttaatgaaaaggagcatatgttataataccactagaaaaaaaaattagaacggtatctatgcataagtttcctagtgagtttacaacaaaaaaagagaaaaagttcaacaatgtatttatgtttgtttcttaacatcacattagtatagagtattaattaattttactgataactaatctctaaaaaaaattaacctatcgatcataatttgctggtgggtttagcgttaaatggtcataatttaatgagaaactaaatatgaaaataatactcggtgtcaatttatgaaaaggtcaaaactaagcatgattatctgtgttttcaattatttatgtttagtatacttatttattttaaaatttggaaaacatataaacaaagttagatgtaatacaaaaaatactctatattataacaaattgttacgtatttcgaatttgaatgtacaaaaaaaggtatggtttcaaggttggaacacggactctatatatacaattcataacaatttttatgtaagaaaaaataaataaaaaatgaaaaatggaaaaatgaatgattatgatgggtcaacctatttacccatcattaaaatggtggcttatattatattatattattattattattattatcatccaacaactttttatgcatgctattttagcttgtcttgtatatagtctacgaatcaaatgtaaaacgacgggatgnnnnnnnnnnnnnnnnnnnnnnnnnnnnnnnnnnnnnnnnnnnnnnnnnnnnnnnnnnnnnnnnnnnnnnnnnnnnnnnnnnnnnnnnnnnnnnnnnnnnnnnnnnnnnnnnnnnnnnnnnnnnnnnnnnnnnnnnnnngttcagattgataaaaaaaaatgataaatctaaggaagaaaaaggaaaatagaaatctgaaaaccaaactaagaaaggcaaaatgaaaattaagatttttatcaccttaaacattgcaaggttgaaacaacattaacccaatcccatacaacaccatatatcatatcaaaagaaataatgaaataagtgaagataagttcaattaaaaaaaaaaatcatacaggaagcacacaattctaatttttttaagttgttagttattttgtcttcttaagtcttttttatttgaaataaattttttcttatcaattatttcgatattcttctctaatgtgagcacactcacatgtctaattagtatttgataatatatcaacttctgacttagtagttttctttatttaataatttattatttttataactgaattccattaaaatcttatctattttaattttacgaaatattaattttcatgaatataacttgtatataaatatatttttgagtttttgaccgcactgatctactttgtatagtttcattcatttcaaaatttaaaggaaaatgaaaaaaaaaaaccctcaatatccctcaaatataagataaatttttatttgattttgcaaatatcattaatgtattttaattattctcaaacaaaatacttctgtacagagaagatttttctatgaacgtattgtgtgtgcgtgtgaatgtattatacgaataaattagaggcaacaaaagctaaacaagcttacgaataaattaaggttgatgagaattttcgtatcgacaaattttgtgcagagaattcaaaactattttattatcaagaaaatattctgtctatttattgtctgtcattttaaaaatacagcataacaatattattatctcatttatattgaaatcatttatattttaatatattatatatttaatttttatttattattctaattaatatctttaaaatgattttttttatctctcgtaataaataaaaagacaaatatattgtaaaaaataattaaaactaatagtattatgtaaacagaagttaaacgtgcctatatatccatttggaaggtagaaaaatatgcatttgaagttggaaaggaaaagcttttcagcatgcaaatcacgtgaaaaaaatgaaggcatctcaaagtgattttccaacgtcgtacgtcaatcctgaactttttggacaaatgtggtagaggatgtacaccacacacatatagtcatcaatggcgagtgactaatatagactagttgcagtcttcgtcactataatggctgtattgcatcgttcacaatttgatgaaaacattggtatgtcgacttttttgaaatggttgagggagaactttcttttttaattataaaaatagtgtgcgaaaattgaaatataaatttaaaaatggagagagataatattgaaaatatcacaaataaaaaaatctttaaaatgtctaattaaaatagtaaatagagtgagaataaaaaaatatatatgttgacttttttttactatatttaaaattatagtataatttgtaattatacattatatgtcatattaagaaaatatcatttatatcattattattttaatttcttttttaaaaaattaacttgtatttagaactaatcacacaacaattttttttaaaaaattaacacaatgttttctttgtgtattttgaaccaatacaagatggaaacgtgttatcatgttgtattgcttccgcacatcttgtaacacaacaaaacacttttttgttatgcattataaacaatggaaacctgtttccatcaagcgtactttttgaagaaaaaaaatacatatatgcatgaaggtgaacttagcaaaaaaatggaatccattaacgaagtccatacttttatttagggatattcattagttgaattttactaaacttattattaattagatcaaattctatggattgggttggatcaaacttgtgcatttttattgtcaaactccaaccgaataaatccattcataaacaagttaattcttgtgttagatcaatcgagtacatctaaattaattttttttaatatataatgactaaatgtctttcaaagagatcaaattgttataatatttgattattttttgttacaaagagtatttgattaatagaatgaatgattctaatgcttaaataatattttatattaaatagatatcagcatgaaaatatagatctaagaaataaaaataaaaacatcaactaaaaaaacatggatgaattaaaaattctatacatatttaattatatacaataatgaatttaaacatattagattaaattttgactcaaatcttaaaaaaaaaagattagattaaattttgactcaaatcttcaaaaaaaaaaaaaaatcgaaccaaactaattagatcattttaagtgattttgaatttatggttatctatatccgtgaacactttttattggattgttgaatcaacatgggactgaagactaagtacgggggatggaggatttcgggcctatgtttttgtgaacgatgcccaccatcagaatgttgtgttttgaactttttggagaaaacaatgggcctccaagtccccttacacaatcacaaaactaaagatgaaaaaatattttcattcacatgccacattgtaattatttaaataaatgaaagagacatgaaataaaaccacaattttaatttatttatataaaaaaaattatatactctttgatcataaatcctaagccgtctcacttccagatgaagtccaaggccggactgaacaaaacgaatgtaaaggtttaattcataaatagccttcaccgattctaattaagcctgtaaagtgtaaactaaaaagaaacaaccaaattaacatcccatagcctcagttgaagatcatggaaccaagtgctcttgtagtgccctctgtcctggaattagcaaaggagagattgatgagaatcccagagccttatgttcgtccgcttcatgaacgtccaatactatccatctctacacctttaccccaagttcctctcattgacctaagcaaactcttgtcccaagatcacaaggaccatgaactcgagaagcttcactatgcctgcaaagaatagggtttctttcaggtttgtcataaatttaatatagctagatacaattttcaatattgcatatagacatgatatgtatgtgttttagtctatatacttttgatcaaacatgattgaagtctttctttattaaggactttgatcaagaatttgcttttcaaactttacatatgatttaatgtcatatttaagaattcatgatgtttttttaaagttataaaagactatattcatatgtttcttacttagcttttaatgtttgaggattaaatttattaatataaaagtacaacaattataaccatgtttaattaaaagtataggaactgaagacatatttttctcactaggatgatttatcaattaccaattactcatgtaatcatgtttttagctaatatcatgtgcaaattaaccatgatcacagctaattaatcacggagtggactcttcattggtagaaaaagtgaagagaggtgctcaaggattatttgatcttccaatggaagagaaagtttgggcagagagaaggagaagctgagggatatggtcaactcttcgtggtttcagagaaacaaaaagttagagtgggcagatttgtttttcatggtcacttattccccaaccttcccttaccattcaggttctctttctctgtttgtcttggcttatgattttttgttcgtccgttaatctgtagagtatagtaaatcaatacgctttttttaacagagtatagtaaatcaataggctttttttaacactaagtatgttggtactgaattaaaaaacaaaaaaaaaaactccaacaatttctttgtcctcaatgctacttcattttgtggaattagtcatctctttgataattatacaggtatttagaatatgaaaaagatagatatttattgtttcaatcatgttttaatttgtaccaatctggataatacattaatatttatgtattcgaacacattaaattacatatatatatatatatatatatatatatatatcaagtaactccatattcaaatagtcaagtgacaaataaaataatttaatttggtgataatttttactctttctttgattttttttatctttatgacattaatgtgaaatattcattaagtttgttgatgattaatattcacagataaatttgacttattatctttaattaaattttttcttttaattatattttttcatctataaaattcaaacttaaaattttatttaaaaagactaattctagtctattgagaccaataacatgttgctactctcccttaggtttaatacggtttccttgtattaaattactaaaaaaatatataaaaatgacttagttaattttgacctatttattttgtatttaagttatgtaaaaatttgaatatatattaccgagaagcttttaatgctttacagagatgggtagcatgtaattttcaaaaacagtggatattgttaatgtgggtagattggtgtcttcatttgcagagatgatttagaggcttatttaacagaattaagaaaactagcgatccaaataattgaccttatggcgaatgctctatcagtgtataacatggaaatgagagagtcatttggtgaacggactcaatcaataaggatgaattattatcctccttgtccccagccagagctagtgatgggactcaatcctcattctgatggtggtggacgtgcgattcttctccaagccaatgaagtggaaggtcttcaaataaaaaaaagatgaacaatggattcctgttagacccctccctaatgctttcattatcaatgttggagacatgattgaagtaattatcttttatttcacatctagatagacatgaatgaaagaaattaaaagtaataattaaggtgattagaaaatagggaaaaaaaagtgtaagaaggatgtcaaaatttaaagtgtaaaaattattttggattttgacaactagtttgctctatgatttaataccttgttactttgcttacctttcctattgttttggcagataataacaaatggaatttacagaagcattgaaaacagggtaacaattaactcgaaggaggagaggatttccctagccacgttttacaaccctggtttggattctattttaggtccagcaccaagcctagcctgttactccccaaacaccagcactgttcaagagaattagtacaccagactactacacgggatatatacctttccaaagaactccgcgggaaatcattccttgatgccacgaagatccaaaatgaaaatgatgttgagaataactcttagaagttaacaattgatgaaagcataaaagttaaagcattaaaagcttcttggtaataatttaaaagttcagaatgaggacaggctttggtagctaaatcttaaataaatacctacaactgccgcgaaaagatgccttacaaggataaaactcaaacttttgagtgtggctgtatttattggggtcaattgagcttctacatgtttgagaatcttaggttaaatttagaagaaaaaaaatatttttaaaagaaataagtatgaagttagaaatttgtaatttatgattatttttaaacagttttgttttgtaagttgttttcataagctgatttctctaatttcatttcaaacaaaaactgattctgattataattgatgattataacaaaaatgctgataaaaataaatgaaaaactttaattaggaaactttcttttacaagaattaaaacctaaattctgaaatagtttttttaagagaaattctgaaatagttgagaagtgaaaaacttatttaacccttactatatatatgcaatgcatgagaacaacgacaaacatatagggaacatgccggccggcatgctgttgggaaaaagatgcttctttagattatagattaatagttggcctgcttaagcattatgaaattaagctcgaaaattacgaaattagtctctagtttgaaattcctaggtttgccattcacgagtgtgtcatttatcttaaacgtagcatatataccactgacagaggtgaagtagtactgttggcgtgtggaatccttagtcctattctagtataatattgtcattaaccttcaccaatcatatatatatatatatatagtttcattaagtagtatcctatattaatcctaccagctgtgtacaacatagtctatgctcagttgaagctatggaaccaacgtctcttacagtgccctttgtccaagaaatagcaaaggatgccttgacgagggttccagagcgttatgttcgcccacttcatgaacgtccaatactattatcaaccactactacacctttaccccaagttcctgtcattgacctaagtaaattgttgtcacaagatttcaaggaacctgagttagaaaagctgcactatgcctgcaaagaatggggattttttcaggtttgccatcgactttttcgttgttgttgtgtgtgtacaacgtacaatagcgattaaaacctaaaatcttgtacaagctatccgaaactctcaccactagtttgaccctagtgaattggtttgtcgtcgatctgatatatcaaattggtacaaagaatattatcctgatcagagaaaagttgattaattgtacatattagatagtcataattcatagctaggagtatcaattattaatatataaaagtcctgaatggatgttgcatataaacaaacgccttttattgataaaacataatattcattttaattatgaagtgaatgattcatcaatcaacgattaatttacagctgattaatcatggagtgagcacttcattggtggaaaaagtgaagagaggtgctcaagatttcttcaatcttccaatcgaagagaagaaaaagttagggcagagagaaggagaaggtgtggagggatatggtcaggcctttgtggtctctgcggagcagaaattagagtgggcagatatgtttttcatgctcactttgccaccacatttaaggaaaccctacttattccccaacatccccttaccattcaggttccactctttatctcttttgttgattatatatatgctttctgcttttctacgtgttccattaactgtttcttccattttaactttgaaaatatgataaaccagcagtaacttacaagaaaaacagtcattaaataaggatatggaattataatgtgtttatattataactagtatagtatccatgtggatacttgagttagtcataaaattaaatcaaatgtataatataattatatatatatttaattataactgttaaatatataatataattatgtatatttagttgtaattttataaaatttagtaaataaaaaaaaataataatcattgtctattttaaaaaaataagaaagtggatgaataatataaaatatattattatcaatatttttttaccattttttttgataatgtatatagatgaaattatatctcacaaagaaaatacttgtacacacataacatttaaaaaggtagttaagacaacatattatatatctagattggaaatatattaaaaaaatgcaagatctagtatagtttattaatgacaaaatgaatgtgtatgcaaaaataagagaaagaaagaactgaagtttaataatgatttctnnnnnnnnnnnnnnnnnnnnnnnnnnnnnnnnnnnnnnnnnnnnnnnnnnnnnnnnnnnnnnnnnnnnnnnnnnnnnnnnnnnnnnnnnnnnnnnnnnnnnnnnnnnnnnnnnnnnnnnnnnnnnnnnnnnnnnnnnnnnnnnnnnnnnnnnnnnnnnnnnnnnnnnnnnnnnnnnnnnnnnnnnnnnnnnnnnnnctttaaattaaaaacatcaagaaactttgcggttagaattacaaaagtgaaaacgaaaagaaaaaaaatggatgagaatcaacacaaatccatggcttcttgttgttgaacaaaaccctttttatttctcaaatgaaaaacatcaaaaaattcattaaacaaaaatgaaagaaattaaaaataaatataaattacatgtaacaataagaaaggtgccataaagatgaaacctacaccaaatgcaagatgtaccaacaaacaattactatattatcgatggtttaaagtctcttcaaaagaaaagataaaaataatattaaaattttgtattacaggttagtacaatactctgagtacataggtaatataattgtttacgcattaaagagaaaacatgctacagagatgaaagaaatgagataataggtattaaaaatttaaaagaaaaagattaaaatttaagatttaaaaaaaagattataatatacttaataaaaagggatgtaattaacaagtttcaatttaatttttagtctggaagtcacacgtgtcaggccacttccttttatagataggtgatattacatgtccattctccaatcaatgaagaaatggttcagcttgaattccgatcgaaaacttttattctgtccttgtacaggtcctaattttcccttcaccttagataaacattagatttgagaggaagaatcttggcacgttaaaaaagtttaaaagtttaatattttttaatgtgaaaataatgttaaataataataataaaattatgtaatccaaaaatattaattaaagatattttggcgctaaaaacaaggatttggattacaacactcaagttgatatattcgtcttcttgtatggttggaaacacttcactttgattccatttgcgttatattataactttgtgttgcttttaagttaattgaataatacaatttgcataatatttttttttcaatcacatttcttatcttatcttatctcatctcatctcatttttttttcttttttctttctttttttatctttctctttcctgagaaaaaaatattgtgcaaaactcccattgaaatgacattgtccctattaatttggtagcaatttttgttctctgtgatactaatttatttagaactttctttattctccttccaaacaattgtctccctgaaaatcagctaccttaaaaaaacaaaaaattaatatatggaatatgtcaagactcttgatgccttgatattcaaattaaacttgtctccatgcgtggacctaattatttaatgattataaatataataataataataataatttttattattattataataaaaataagtacattgacaatgtgacaaagtgaacactacattttttttaaaaaagaagtcaacactatataatgcataagtggtatcgcccaaaccacaaactagtggcaaactaaattagacttaaaaaaaaaaatacgtagcatctatatagtatattgcatattgacattgtattttactacccaaaacatatttttttttgtgggtgttacgaatcttcatttggtggcagagatgatttagagacatattctgccggattaaagaaacttgcgatccaaatcgttgaacttatggcaaatgcccttaatgtggacaccaaggaaattagagagttatttggtgaaggggttcaatcaatgaggatgaattactatcctccatgtccccaaccagagcttgtgatgggactcaatccccatactgatggtggaagcctcactatccttctccaactcaatgaagtgcaaggtcttcaaattaaaaaagatggatcatggattcctattaaacccctccccaatgctttcatcgttaaccttggagacatgatggaggtaattaattatactattaagtattaacaagctagatcaactttttttttaatatacagtgattaattgtctaacattttcaatttaatttttgcaaacatgtttggtcctttaccttaacaaccaattgggtagataatgacaaatggaatttatcgaagcatcgaacatcgagcaacagtgaacttagaaaaggaaaggctttccatagctacattttacaaccctggcatggaagtaaatttaggtccagcaccaagccttgttactccaacaacaccagcagtattcaaaacaattagtttacccgaatactacaggggatacctctcaagagaactccgtgggagatcatatcttgacagcatgaagatccaaaatgaagatgagaaaagctcttgacattgctgtgacccaaaatatgaatggtacaaaagcttctgtatatgaatttgacgttgctggggatttcagtttattattattgttattttaagttacgcatgtgctttctcatagtttcttttcatttttaggtgtttgttttgtataataaataagttttttttttaactactgcatgaatgaataaggtattataccatccatcaataagaaatctagtttagttattaaatacgatgtggtagaacttaaacacaaaagaagagccatatcaaaagactaattcattaagagaacctcaagacttaaatacccacatcaaataatttatttttctgtgtgagactcctaatataatgcactagttattgtaacctatctaataactgttatggattaatatgaataacaaaaaggttttataccattcatatccacgtacaatatatacgattataagacattatattgtattgtaattgaacttattgttatatatagcactgaccactagccactagatgatggcatatacattttcactcaaaattttaaccaactgtttaagtaaaaaaaattccataatggtaactacgtgcgtgtatctctagagcggcagtgatagtcatctctaacaatactctaacgctcaagtgagtgagtaatttaagaagcaacagaattgaattatgcataccttagcgatagtagattttatttctgttgggtggcatggatttttcaaaacaattgaaaaagtcattgacttgtttaagcttgaaccagtcattgactctatggaagtattgaattactgagtcactgattcatccaatgagctattggttgaatcggtagaatctctcacacataaattagtacaactatataatcaactagtctcaagctcaattctcaactatggcatttatattaaatatcttttacaaccggttcaatcatgaaaactgatatctacttattcagatctaattaagactagttcatactatttcacatgcacgaccagtctaataagatacatagatcagttacttgaccaattcaaataacatttcatatgaaatttaatttcaaatatagctcacatgtatcaagtcattttatctgggaattaggttaattgatttatctggaaatgactacttcatttttctcggcaatatcaaatgactacttcatttctgcatacagtcaagtgcaccaatttcaaattaatgcatctaattcatttatgcatagtgaatcaatctggttttttttgttgatagttgaatctcttttcatttctgcattctgatttttattttatttttttatgaactacttttatgcacttccagttgtagtttctgtgccaaccagatgctcaatcattttaggagcaataaaaaaaacacatttgatcctcaaagcaagagtgatcatgtcaccaatattgtgtgtgaattttttaatgcttgggtcagggatgataggaagagactgtccagtcaatgatgcaatcaattattagtagattgatggtgctttcctaaattaaccatgtttacagctaattaatcacggagtggactcttcattggtggaaaaagtgaagagaggtgctcaagaattatttgatcttccaatggaagagaagaaaaagtttggacagagaaaaggagaagctgagggatatggtcagctcttcgtggtttcagaggagcagaagttacagtgggcagatttgtttttcatgttcattttgccaccagagaagaggaaaccccacttattccccaaccttcccctcccattcaggttcttcattctaaatttctaatttgtctcttgtatcagcgtgcttttttttcactgcttttgcttcggtcaattacaattaatctctaaaatatgatgattccatgctttaatattaagttcatgatattacatttcctttaatagatggaaattggaaatcatataaaaatttactatttttctatcctatatattttttataaccatattgatgcgaagtagcaacggctttgttgatatcatttttcttaaacaaacagcaatcatattatatagtgccaaattgttatactgtagaaggagtcatataacaaaaatgtgaggctgatttgttaaaagttttaccatgtaattaatcattgattatttgtgtggataacttgataccttcaattgattgcaggggtgatttagacgcctattttgaagaattaagaaaccttgcaatccagatccatgaccggatggccaattctttttcaatagacccaatggaaattagggagctacttggtgaagcagaacaatcaatgaggatgaattattatccaccatatccccaatcagagctagtgatggggctcaatcctcattctgatggtggtggtctcaccatccttctcgaagccaatgaagtggaaggtcttcaaataagaaaagatggattgtggattccagttaaacccctccccaatgcttcatgttattggtgtaaaatatttctcgactttgtcaataattaatcttcaccggtaaatctttagtgtggtctaccctctcaaccaattttttttcctgtctatataaaacttgaacccgagatcttacttaaaaagattgaacttattgacttattgattcataaaatagtttaaaatagagaacatagattttttctaactttttcatttcttacaaacagtgattaatttgttcttaccatatcaactgattaatttggcaggtgatgagtaatggaatctaccaaagcatagaacaccgggcaacagttaactcagagaaagagagactttccatagccacattttacagcactgctatagatgcaattattggtccagcaccaagccttgtaactccaaaaacaccagcaatgttcaaaccaatcagcgcggagattacttcaaaggatacttgcacaagaacttcgtgggaaatctttccttgataccataaggattcatgctgaaattgaggaaagctcttgaacacttcaaaattgatggagacattaaattttaatatatggcacacaagcttctgtatttggcaatgcatctttttcagtgaagcatgtcataccaacagctattgtatgagtaaattgagactaagggtgttcaactccaaaccgatccaaaataaaaaccgaaaatcgaattaaatcaattttttttgaattggtttggatgatttttttctcaaacctattgatttggttcgatttgtaatttgtatttttgaaactaaatcaaacgcaatacttatattattttaatattatgatgtgtatattacttaagtttcacagcttttgtagttttatgtatacgaatttatacaatgtttatcattttctttttcatatgactttttaaagatatatttagtttaaaactgacgaaactttgatagattttattgttgaaggtttaacatattaataagtatcgtatgttgttattagtaattttttaatgtaatttaatttaaaaattgaaaataaagtatctaaattttaatgaaataatatcttagtaaaaattacaaaaattaaacaaaaccaaatagtaaaatattggtttgatttgaattttattttaaatgaaaattgaaccaaatcgaaccgtgagcacctctaattaatgttattccaaaaatgagaggcttttaaacaaagttaaaataataattaataaacataattattattgttctgttctgtgagaacagaattgtccaacaatggtgttggggtgtttgatgtatgatcaggttccccccctctctctctctctctcaaggagcttatgggaataaagcagctcgaggaagagaaagatcacagcggcagcgatacggtttgggggtgcagtgtgtgccgtgcgaatgaaaatagagggatagaatctctgtgtacctttcaccgtgggagatgtcgcatttataagaagctttaccttggaccttggaggtgtttcgccctggactcgtcatcgtgtttccaagatatttggagatacgtcagtaatccttccatttttattcaatcaggatctgattatcagtaattcaaatatttgggtcattaacaaaaagatacgatatctttttgttcatagtacccttttatccgtaacaattataaaaattattaagatggaatgtggattcctgttcaaccctttcctaatgctttcaccattaaccttggagacatgtctttcaaaacaaaaaattaacattggagacattttagaggtatttgaacaaaactattcacaactttttgtgtaagttgagtatctatccgttaaatcattgtaaattagtagatgtaagaagagaataaggccttaagaagcatttatatttgtgatgattttgatatctttatactgctcaaacctcaaacaccactcgatgactcaattgcctttgcaatatggttttgtaaatggtaacactggaatttatcaaagcattgaacatcgagctacagttatttcagaggagaggatttccacaactaccttttattgccctaatggccatgcgactaaacgtccaacacctagccttgtaactctagaaagaccagcacacattgaatagaagtattagtgttgctgaactctttaaagggtactttacccgataactctgggaaatcatacattgatgaaatgaggatctaaaacgggaatgatgaaatcaattagaacatgtgttgaaaacacaacaattagtcatactagaatcaagcaaagatgatcaatgaatatattattaagagattagaatgagtcaatttatgaaatattataataacataatgctctgataaaaaaatttaaataaaatcatgttgtaatggtttaagctagtggtctggtaagtaaaaagcagtatggtattactgaaatcagagaaaccatgcatatgcagagaagtcttgctacttgtactggggattgtgttctcttatctctggataaatatgatttagcatagatgcattatttacttttgttacttttgagataaatatttaataagaaggtttggtatgactttaaactatttactgtacttctttatatataattcatggaactctgtcatgttatatattgacatcctgcagtcttagcttatttacctttcggtcaacctttgagattatgattggccacaccatgaaagaaagggtcagaaaataatttagtaaggaatatgcatgtgttttattcttgagtgtttgataatgatgcctatatttccatgagtacataaagttgataagggaagaaggatgataaaaaaaaagaagttaaatttcagcctggtctcatggaaataattttgtaggaaataagggttaaaggtatttttgagcaatgtgtaaataatgttttagaaagcaattttaaaacaaaaaaaaagcgagagagaaaaatcaaatgtcctaaattgcgacttttagatttttggcaaactgttttttttcttaattagtgcattttcttaattaaagtagaaattagtgcatttatttttgggaccaaaataaagtgcattttctctctctcctagatgtgttctctccctaccttcttattactgttctctcaaaagtcaaatcacattaaattattgttatcattttcgatgaaattcataattcactctttcaaaacacataaatttgaaacgatgaagtttaaaataatgtcaaatataaattagtgttttgagcacattgattaatgaattaaattattttattaaaatatataaaattacacttttataatttttttgtttttcgatgattttttaataatattttttaattccttcgttcctttttgatagtttccataagatatatagatttgaagatctctctaattttttctctagtggtagatctcattttgaaatcataaggagagagaaaaaggtaaaaaatttattattttttgaactatgtgcatatcttgaaagttattctacaataacttatttttcatattggagatctcttcaccttctttattaagtgatctagtaaagatcagatcttgaagtcaagatttttactcaagatccagtactaaagatgctctaaatgtacaataatcattttaaataattttaattcaaggtatttttttataatagtagtataacatatgcgtattttccctttttccgtatggaccaaaaatatttttgcattaattaacggtcacagatctggccgtaattaacttgtctgaagagttatgcatattttgatcggattagattaacaaaaaaaaaaaagggtaagaaaaacaattatgatgccctatagcagggaaagagacaaaaaagagttagtgaaagtacctggtacctgcactgatgcttatatttagcttatgctagtcctgcgactgcaacctcgataaaagggaaagaaaagagaaaatagtgcgtgcaattatggaaaataaataaaaacaaaaataaaaatgttggagtggtagtagtacactaataagcttagctaaatatggatgttataacattcggaatcatagtcggcattatcatcctcttcttagtaattgtttgctacatcaccatcgaaggcacttgcaactcacgctcttgacaccaacactcttcaattccatggcattgggtagaaaaaagagtgtgcaattagcattattgcttctcctctgtttgtgtttggatctgggaatagcgcatcagcatcagcatcagggtcattctcattcccattctggtttctgtgcatccgatgcccatcatcactgcggggatgaccatccccatggccatgcgcatgaccatgaccatcacaagattgatggtaggtcgaagcttcttcccgaagagttagcggaggaagaggatatgaaactctatggcttcggtttgccccatcaccatcaccatgatcacggtatcgaggctgcagaactctccggtttaggtattttcatccattttctctcactccttaatgttgtgtcaattttaacattcttaatttcaaatgcagctcgtgggaattaggtcagtgatggtttgattaccaaattttgtagggaattagaatctatttatagaagctttgaggggccatgtgattgtggtcctatcctgatgtagggtttatgtgcaaagtgccgctagggtttatagactgatgcagattgctacgaagcctgtgtttcgtgcaatttataatgtaaaaatgggggtggtgatagggatttccacaaatgtacttggtaagtaacatatgatgtataaaagtcacctaattaagttacttaccgtggctacttccctatgttgtatagggtgggctgaggtgctaatcaggtagaaaattatggattggaggcaattcttgtattgaggattgatggaatgagtgtgagatgtcacttggtaggatgagggactgctagcttatctccaggatgtggaaaactctgtttgtttgactgagtcctgtttagaagattatgctcacggctttccttgtcccatagaggttcaattggagtaattcaacttgagtcttaaatacttattcaagttgaatgctcttctcgtccattaagcttgcacagctttctgtccattaaaagcatcctcctttaagtagatttttcatcttagtaacaacaaatcaaaagtcccattcataatgacatttggaaactattacttttttatttggagattaagattatcttcttcttcttcagacatttctaatagaatgcaattcccttataacatttatatttttggattaaaaaaatggacaataatagcataagatgtgtgctgttaatgatactctagctttctggaagctcaaatttacagattatttcagttttgatgtttatatagttcattggtttttattctaggcctttggttgaacgcattgggctgttcatttctggtgagcatggcttctcttgtttgtctgattatcctgcctgtaatttttggtgagtattttttgtcattttatacaatacaaattatgagggcgagccctggcacagcggtaaagttgtgtcttggtgacctgttggtcatgggttcgaatccggaaacagcctctttgcatatgcaagggtaaggttgcgtacaatatccctcccccttacctgcgcatagcgtggagcctccgggcactggggttacagtggtttttttttttatacaatacaaattatttatttttcaataggaaaggcttatctacagtatacaaaactgaatactccggtttattcaccaatttcagtacaagggaaaccatcaaaggctgttgttgattcattggctttatttggggtcaggtttcatccacctactttctttggtttcacttatcttgaattctctttttattgcttttctttctggtcatcttgggtattattcttccttatttccttatcatgagattttatacttcatggcttggaaatcgagaatgctagcacaatgctaactgggaaaagttacgaaatcatctgctgtcaataacttgattaaatatcttcttttatttctggttaacagtttttgcttcatttcattctcattggtcatgccttttgcaggcaggagctatgttgggggatgcatttcttcaccaattaccacatgcttttggtaaggaatgcatcataacctgtcttcagtacagttgatgcctttgttgattgattttgtataaagttcagttgaattgttgtaattgctagttttccattatttgatatcattggaggaaattatgtgtctcttttcctctttctctgatctccttttaactttcttattttctacgtgtgtatctgatagaggtcataataatagatggggcagaatatatcagagaagaggagttagtagtaattttgattagaagcaatagttgttaagtgaaaccacagcagtaacaaactaattgtagttactagacagttagctgttataaatagacagagaaaagagagggagagttagttagaaacagagagtggagagtggtgtctcgaaatcaccattgttactgtgtaattcaggcaaattgcctcattgtgaataaaagctactgcattttccatattttcctgatccagttcttatcaactggtatcagagcccagattctagggctttgtggaattgaatggcggcgaaggcaaataacaagatggaagcaagatggaaagatttttccgactgcaggaggtgcggacggaagagagaatggagatgatcttggtggcactggaaggtgaggctttgggatggttccaatggtgggaacagaggaacccgacaccttcttgggaggaattcactgtggccttgactcaaagattccagggagcaatgctaggtaatccctttcagttactgcttgctctgaaacaagaagatactgttcaggagtttgtttgtcaatttgaaaaattagtgggtactatgaatgggctggatgagttgttcttggtggaagtatttttaaaggggttgaaagatgagattagtgctgaggtgaggctacacgaacccagaaatttaatggaggccatgaataaggcaaggcaagtagaagaaaaactgagggtatgggcaagggctccaagaagcttgggtagagttttaccagtgcagaaaactaatgtctggagtgtgaagaactggaaggagggatcaaattggacaggaaagggggttgaaggaatgaataagacagtaagtggaggtgaacagatcatggcagccaagggtggccatgagaattggaaaggaaagaaaaatttccacaaattgtctcaagctgaaataaatgaaaaaatgaggaagggtgaatgtttcacttgtgaagaaaagtatcacccaactcatgtttgtaaaaacaaacagctgagactgatggtgatggaagaaaaggaagaagaggaatttcaaggaaatcaagaggaagagggaagtgaagggctgtatcaattgtcattacacagcattgaggggttcacataaaagatctctcaagttgtggggcagaattaaaggaagaaaagtagcaattcttattgattgtggtgccacccacaatttcatatcgaccaggctggtaagggaaatgaaattagaggtaacccccactagcccttattctgtagaagtaggtgatggacataaggtgagtagtaaaggaatgtgtaaaggactagctgttgagttgcccaatttacagattgtgcaaaactgttatttgtttgagttgggaggtgctgatttgattttgggtgtagagtggttagctagcctaggagaggtaaaggctaattttcagaagttaaccttgactataaaatctgaaggtaaggaagtttgtttaaaagctgacctagaattaataagggccgctatcagtttgaaatctattagaagtactatattggatgacgaccagggattcatgattgagttgaaaacagtggaaacaaaaagaggggtggaagagaggtctgaattggtgttgggagtgttggatgaattctgtcagatttttgaagaaccccagagtctgccaccacatagaagcaaggatcatgccatcaatattcagcctggagttaaaattcctaatttgaggccatacaaatacccacattaccagaaagatgagatagaaaaactggtaggagacatgttagcagcaggaattattaggaccagcataagtccatatgctagtcctgtcatattggtcaagaagaaggatggaagctggagattctacgtggattatagggctttaaacaagataactgtgcctgatagatttcctatgcctatcatagaggagttgctggatgaaattggaggagctgagtggttttccaagttagatcttagggctggataccatcagatcaggatgagagaggaggatgtgcagaaaacagcattcagaactcatgaaggacattatgcgttcttggttatgccctttgggttaaccaatgctcctgctacttttcaggcactaatgaatgaggtgatgaagccatttttgagacagtttgtattagtattctttgatgatattttgattttcagtcctacattagaagaacacattatgcacttaaaagcagtgttacacgtcttgcagcagcaacaattatttgttaacagaaaaaaatgtagttttggccaaagaagtttggattacttgggtcatattatttctagtagaggtgtagaagctgatcccagcaagctggaagctatgacaaattggccagtgcctagggatacaaaagggctgagagggtttttgggtacaggaggtttgtaaagaattatggacagatagctcacccattgaatgcattattaaagacaaatgcttttaaatggggagaggaggctgatagggcatttgatcaattaaagacagcaatgaaggagttacctatattaaaagtaccagatttttccaagcaatttatattggaaactgatgcttctggtactggactaggggcagtgctgttgcaagaagggaggccattagctttttggagtaaagctttatctgaaagaggtcagcttaagtctgtatatgaaagggagttaatggctgtggtgttggcagtaaaaaaatggaaacaatatttgctgggaaggaaatttataatcaaaacagatcaaaagagcctcaaatttttgagtgatcagaagttattaaatgaagatcagtttaaatgggcctccaaactgattgggtataattttgagattcaatataaaccgggaagagaaaatgttgtggctgatgctctttctagacagtttaatttctctgctatatcagtggtgcagcaagaggattgggatgaatgggaggaggaactgcagtctgattctcaaatgtatgacatttacagaggaattttgtccaagacaatggaaaaacctggttattcagttaagggaggcaaactgtattataaagacaggttggtgttggctagaaattcatcaagaattccattgattttaagagagttacatgattcacctgtgggtggacattcagggttttttagaaccttgaaaagggtagctggagtggttttttggaatggtatgaagaaagatgtgagacaatatgtggctgaatgtgagacatgtcaaaggaataaagctagtacactggctccagcaggattattacagcctttacctattcctaatagggtgtgggctgatatatctctagattttattggcagtttacctagagctcaaggtaaggatactattttggtgattgtggacagattcactaaatatgctcatttcttggctttgagtcatccttttactgctaaagaagtggctgatatattcattaaggaagtagttagattgcatgggttccctacatctataatttcagatagggacagactgtttatgagccaattctggaaagaactattcaggcaagctggaacacagttgaaaatgagcactgcttaccatctacaaactgatggccaaacagaagtagtaaacagatgtttggaagcttacttaaggtgtttaactggagataaaccaaaacagtggcctgctcacttggcttgggcagaattttggtttaataccaattataatatttcagcaaagatgtccccttttaaagctttatatggacaagagcctccattgctgattaaaggagctgaccttccttctaaattagaggaagtgaatcagatgtgtaaggacagagatgaattacttcaagagttgaagagaaatttgttaaaagcacaagatcaaatgaggaaatatgcagataaacataggagggaggtggagtttcaggagggagaatgggtgtttctgaagttgcagccatataggatgaagtcattggcaaagaaaccgaatgagaagctcagtcccagattttatgggccctacaagatcattcaaaaggtgggggaagtagcttataagctggagttaccagtagacagcaaaattcatcctgtatttcatgtttctttgctcaagaaggcagttaaacctacttgtcatcctcaacctttacctaaggttttgaatgatgacctggaactacaggtgcaggctgagaaagtgatgcagaagaggactacagcacaaggacaacaagaagtgcttattaaatggcacggtttacctcatcacgaagatagctgggagagtttggaagaaattagttctgtgttccctcaattagaccttggggacaaggtctctcttgaaggggggggtattgatagaggtcatagtaatagatggggcagaatatatcagagaagaggagttagtagtaattttgattagaagcaatagttgttaagtgaaaccacagcagtaacgaactaattgtagttactagacagttagctgttataaatagacagagaaaagagagggagagttagttagaaacagagaatggagagtggtgtctcgaaatcaccattgttactgtgtaattcaggcaaattgcctcattgtgaataaaagctactgcattttccatattttcctgatccagttcttatcagtatctctctggcttttctttttaccggtgtcattctcagcattagagtattaatggttgtgttagtttgatcgctaatgctttgaaaatgtaaaaaatctgaaatttgtttatcagctcttgaaggaaacatgtgtgaagtgatagtgactagtgtgacagaaagactaaaagtgtggtactggttattttacttgattttttttttcttttttcaaatcaaagattggagactttaggatattgattcttcctgtaattcctattgtctctttgttaccaactttcttaattgagaaaagtttcttcttgatccacaaatttggaaatctactgttaggtaccagaaagagccaagagaactagagaataaactttcatgtattgctatcaagtatcaagcctgtatcgaagagatacctggttctgcagtatgagaaacggagtacaagtgataaagaagaaaaatattctaggcaattcaagagtgcctagtccctcccagttcacacttccgaagcttataccccttgcatccaatccacacaccccaatcccctccctacttccagctcagcagttagttactaagtggaatcttactcccattctctttcccctgggtatgatcctctacatcacacctcttcctcttcctcttccatatacattttatttattttgggctttggggtcttacactaaggtcaactctttgatctagggagctataccttgtaggatgtgatgacatacagattcgtaggtcctgtactgctctttatactgatatttgtgttttggccagatgaagttaagaaagagtgagcgttttacttttacaatatcaggcagttgtttcctttggaaaagaattttttggtgtgtttacttattttgttattttatttgttgggagtaaaaattgtttgatgagtattaggtggttgtttcaatttagagaaatttctcatgctccattttaaatgttttggtagaaaaggatcaaggatatattgtactggattctgtttactctagtccataatttattatgcacattactttatgatttgcatagagactgcccaagcttgctgtgttcttgattgagttgattcatttcaatttccatcttgttttttttcccctattttgttaagaaggatatgttatcctttccctagttcttatgtcccttttcctttgtgataatattttgtttcctaaaaaaagtgttagtttgtgacataatatgattctcttttactgtaggtggagaacactctcattctcatggtgaccatggagatcatgaccatcatgctagttctggacatggtcattcacattctttagccgatctttctataggaatatccatccttggttagtagtgatatgcttgatgttcttactgatcatgttggttatttacctgcaaggatattttaaattattgacttcacttacttccagttactaattgcatggaataagtttatattttttcttatttgtattcagataattcagacttttggcctgggtgaaggaagtttattatgatcttttgaaaggagggttgtgttaggctctcaacaaccaatgtaaaacatgtcgaaatcccaaacatggatcactcacgatggattgtgtgctattcctagatttctatttagaattaataggttgtatttctcgagtacactgtttaatgagctagagttgttgtgttggagcttggattatgttaaatgtgcaagggtcttcacatttttctagaggaatatgggcaacaatatgagttcaagagtgccttattaggtttggtacttgaaatattggtactatgacaagtaagtatttggagtaggtgggcaccatgattcggaaaaggattaatatcatgtgtcttcaagaaactaaatgggctggagaaaaagctaagtatcagatttaaactttggtacatgaaaaaaagttagagggaagattgaaagaattacatgagtattattgtggacaaggattggaagaaaagtgtggtggatgtaaaaaggattagggagataagtttatctttaaaattaattggttgcatgggagactatcaatatagttagtgcttatgcaccacaaggtggatcaaaagcacttctgaaaaaaaagttttgggaagatttgaagggtttggttcaaggctttccacgaggaaaagaattttgtaggtggggatttaaatggacatgttggtaaaaaaaaaattacgtaccccaatgcccgcaggctccacgctatgcgcaggtaagtgggagggatattgtacgcagccttacccttgcgtatgcaaagaagctatttccggattcaaacccatgaccaacaagttaccaagacacaactttaccactgtttccggacatggtggtagtgagataaaaaacaatttccatatcttatagtggttttggatatctaattggggaaggacagtttattcttgatttgtcaatgatgtatgatttcacaattatgaacacttgttttaagaagcaagcagaacatctagtcacttattgagtccaatggcatcatgtaatctatgtagccaaccatacctagtaggataaggctatttttgttgttttttgtatgacaccatcatgacaaaccactttcatagcagtgagaaaaaaagtggggacagggaatttgaggttgaattttcttcttaaagccatgcttgtagctgtgattgatctcttccttcatcgtctcaattttctttcatctctatatttctctagtcatttgtagtcttcagaaagtaggactatgcaggtgggttctcttagaaccacaatttgttacaatgttttatggttcttgcagctggaattgtgctctttcttcttgtggagaagttagtgaggtatgttgaagaaaactcaggaggagctaattcatggacgcatggacaccaccaccataacaacaatagcaagaaaaaattgaaagatgataacagttctagtgtcaacttgcagtcagagtctaataatgcaaaagaagagagattgatagatgagataaaaaaagatgatcaagtgtcacgtgactccttgaagggagataatccatctcaatctgaaacctcactcagaaaggtaagatgagcactggtatgtcacttcagctgactgaggttggaatgcaccatttggtttggttcgaaccattgttgatgtcgtacatatgccatgacttttatcagtagaaattcccatttagccttcagatgtttgagcagttgtgctggaaatgcaattactaataggataataatatatgcaaaacctgaacagctggaataggatggttacacatgttgtataatgctctattagacatttagtttgaacggaatattggaggggatgagaaacaattatctgacaaatgaaatacttgtatcacagagaattggaagcaatgtgaccaaaggtgatccagacactaatactgtagatagcgccacatataatgtaaaatcttcaaatgttaaggaaccagttatatcaccaacaagtcttgtgtttggttatctcaatcttttctctgatggagtggtaagttatattttgacctttaattggttgtaaattgtaatgaaggaaagttttcgatgtattcatgcaaaatatattaatattgcagcataacttcaccgatggaatggctttaggaagtgcattcttgctttatggatctgtcggtggctggtctagaactgtgtttttgctggcacatgagcttcctcaagaggttcaaattcatctttattctatcacatgttcagttacatgagtattatgccaatctgcagaacattttcatcccatttttaggcataacttaatttgtaacaaactatttcctgaaggcctgaaaagtttgtttaatttgacaaagtgaagcaaatatgtatctttgttaatgtgacgtttatatttcttattgcctaattatttagttaaagttcataaagtgcttactgcttagatctttttattacttgattttaataagaaaattagcactgatatgttaaaacttgcaaattatggtgtcagaatagccaaacacatgattcacatgatgacactcaatttaatttatcattataatcttcattgttgtgtatttttaacaagcataaggtactatgaaacttcatgaacaatgttatactatgaagaacattctttctgttctttgatccaaacattttctctcaatctctttctcactacctagctaatactttcactagtagagggttcctaaaaagacttcatctggtgacatttatgcacatatgtcttcatcgatgtacattccaggtgtatattcagatttcagttagctattatattatctttactaaaaaaattctcactactcatctggttatgcacatttataaacatatatgtccgtgtcataattgaccagccgtccattgtcatgcacattccataccatggatccaagtccatgttatgaatcttttaagctgatgtttatttgaatcttatacattataagcaatgttaaacattctaggtcatctgaagccttgagactctttgagccttgattaatctggcatgaaagctgtaagatcttaagtatcctgccttaatgacacattcagggaaatataagttgaacattcagtgctatcatctcctaattgaggaagcgaaattcctgcaagtgatcatatttctgctattttgggtttcatgctttgttattgtcattttataatgttttcagcttagtattttgttcttgcttttttatctgatttttctgtctcaattttgtttattgttgacatatacattccatcggtattattggattgagatcttacttttgtcccaccaaaagttttatgctatttgtttcttccacatacagattggtgattttggcattctgataagatctggtttcagcataccaaaagctttgttcttcaactttctgtcagcacttgtggcacttgcggggactgcattggtgagtgttgtcttccattcaatatttcaaatgagtgagttgtttagtggatccacaaacggcttttacacacaattaacattgaaacaaaaataaaagtgaatattgacaataatgtgttaacaaatattattgtaaatgagtgcaagagaaataaaagggtaatcaacttttttttgaaaggctaaaagtgtaagtaaaaaattaaaatgagctaaaaatgaaaagagagattaattataccttagatttctatatggtaacaaaatgacgacttctaaacttttatgggactattataaatctttttaaattgtgtttctctgaggaatttacagttgtgttaggacttggacaattacgagtatcacatctacatacatttcaatgtcccagattcccttttcttgatttgcttcccgtcattattattattattattattattattattattatgcccaagaatgaacatggaatgaaatagaaaatcactgtttttggtgtaggctctgctgtgggggaaagatcctggacagtcatctttgattgaggtaaggaatgtttcataacgaatttatactggttgattgcaagttgattgattttagcaataatttgtctccttttttacagggatttacagcaggtggatttatatatatcgcaatagcgggagtacttgcagaaatgaataacagtgggaatacaacattaagaaatactgttgtccaaataatctccctgaccatgggcatggctgttgcccttggtatttcccttgtagaatgaaagaaatgtgttctgtttaggacttgcatgtctagattcctgattttccaattatttcacaaaaaatatgccaaccagtttacgaatgttctctttatatttttgctttatgctaaacggtgaacccagaaaaccttgtagggaaaggggaattgatagaaaatgagggatcaaacagaatgatcagggctttaccccatatgattccttactccctaacagagtgaactttgtacagtacatgttttttcttttcgtctttaatactaacctagcacaagaacgtctttttgtcaaaactgtgtattttgtaacattttactctcttttgagctgtatagcagtcaaaatggtttcctctttctgatgcacgtaagatgaagacactgattgtgtctgattgattttgtaccttttttcctcggttgtctttatgttttgggtttttgctgtctttctattttattctcttccaatggaaattgagcctgcacgcctacatttggacaagggtggtttatctcatatgaaactcacttcacacattttgatgggacgtaggtaagtaggttttgaaattgttaagagtatctttgtggtagatctcaaattgaaattttaaattattttggtggactcaatagtatcacataggattgaaaatctatcaagattttttttatttttttctttagtagtagatctcattttaagatcttagggagagaggaaaaaaaaattctttttttaacaatatacagatttcgaaggttcttttacaagaacttattctccatgttgaagatttttttacttcctttattgaaaaatctagtgaagattagatcttgaactcaaaatttttgttcaagatctaatactaaaaatattttaagtagaggctgtagagcatttgacatgcctagttgggacaaattttttttagaaatgctagcaatataactatttctacattatttattattggttaaaatttgttaaacatttaaaaaactgagggtttcattcattaaaatttgctagcatttctccaaaactttaccttaacaccataagtatttatccaacatgcctctgcacgatgaattgtataatatgcacatttgcaaacactgaagtatagaaatatctggatttagtagaaaacatgaggtacattttttgacgacccacacatgatgaatacttgggatcttgctgctccaatgctttttgtcttgctctattgaagcttactcagcttataaccaaaatgcatccttcgttacatggaatgttgtgatggaatttatttctttgttaagactcgaacttgtccatctgctgaagcacctgaaagatggtgatattctgggatggtaagggtgggaggggtggcattctcattaatggagtcatcacaaggtctcctccttcgtgtgtgagggtgtgatgccgctttcttactcctcgagctggaggctctgcgtcaatggtggtggttccttctccattcaccacggcccgggttgtctccactctcttttttgagctttctgcaaacctcttttcatgcatcctttcatcctgcaaaagccatgtagatgtcagtttcttccctgaacttcagagtgaacttcaaaatgcgttgaagtactccttttacactgcgttttctgagggcctatgaaacaaccagtgaaattaaatatcaagagggaaaactctggttcttattttccttataaaaaaaatccagacaaaccagtaactagttgtctagttgtcaacattcataggatctgattgtattaatttaattagcttccattatttattgttttatggtacaattttttgtacatattgtttaaagaataattctaaatctttttataaaatcaatttactaaatgcaaaaaatattaaatgtttcctttttatatttttaagatattaagtgtattttcttttctatttaatactggcttatatgatatcaaaagagaggataaagtaggaaagtatatccctctagctagaatcaacatctaaatgtttgacatgtagatatctagaaaacaaaatcgagtgatggtttatctatacagcatatctttttactaatttttaatattttattaaaaaatacaaaatgaaaaagtaattgtgtttaaatatcgtcttaagagaattaagaaaaaagatgttttagaaggattgagaatcatttaataaaaatcaaataccttgacgaacaccttatagctagatattgagaaatacattatgacttaatacatacaagattctttttttccttcaaagcaaacacctagacagattagaaacacattatgagaaatatctgcacagtactgatatagaattcttttctttcaaaagcttccttcctgttttgaatgattttctacgatgtactataccctaaaaagtcattctccacatctgtatgttgcaattcaaagttagaaagagaagctttggagggtgtacccctggtccagtatatatgtctttcaaataatgcagcccaaaaaaaatttatgtttagtatatcaaattcttgtgttttaatttatacggtatataaaagtacacctcctgaaactttacatgtcgattcctctgctagcaagaaacgattacaagaatacaactagaggacaaaatgcataaatacatatatatatcatggacatgatgggcatatgtaaaacaaacctaaaaaaacgaagctgcattaattatttttccttaccatgcaaacatcatatgataagaaaaacaacatatatgtgcttacgttgataactgaagactcgggcattgggcatttcacgggacgatcttcatctggtggctccatagggtgttctactgggaagaaatcagtgcttttatcaacaacaaccccttgaacatgatgcacttccatgatgatactgttttgttgttgtgttgcactagtctcatctatcaagggaaactggctctcttttccgtcctaaagtatgtaaaattgttttgcataagcaacagtgcaatatagaagaagagaaaagaaagaaaaatcatcaaaagattcttgtctattacagattctccaattacccattttatgaatgaaggagttggagagagaaacaagggtttgagagcacttacaaaatgatcctccccgcatgaaaatcccatgaacatatgagctcatgccagaagctgagaaaatgttggtttgtctgtctgttgtgtgtgtttgtgtctgtgagagcgagagaaagagaggaaaagatgggaaaagagaaagacagcataaaaaggaggaatatagcagaatgagagagaaagacagagagagagagagagagagaggtgcaatgtgggatcaccttgaacagttgaatacgaagaaagattcccattgggattttgctactagcttttaaaatcttaacctttcgctttctttgttttatttttgtttttaatttttatatgggtgcttgtctcttgacgaatcagaggcatggcttttcttttcttgctttgatgctttttaagaagggtagcagtgtacttggttgaaaatgttggtagcacaaatcatgtagatctactaatttagtgttattttatcttaactaattagtgatctcatattcaaatcttgatgcataattatattaaatagttaaagaaagaattttatcttccataatttaactcaaacaacatgattatctataataaaaaatataaatgatctagcaagaaaaaaaatatattctctcattttctgtttctctctctacacacaacacactttctgctttacttggattttgcaggaaggaaataaccaacagattttgtgcttggtgctgctgctaagttacgcacaacccatatatccgtcgtaaagagcaaaatcaaattaagcttagaaaatgaggtgtggagaaagagaaagcgagagccgaaagcaaaaatatcgcgtcattgccatgactttagtcttcacacttttgaagtgtagccgttcgtttttttcgatgtaacactcgtaaagtagtacgtagcatgtaacagtttcaacatcaaagctacattttacatgtatacacgcattaataatacttttccatagtatatgttcatatgaagatggtgtaaatttaggatgttaaaaccatttttttatgtatttcaagttgtatgatgccactgaataaattacaaggagaaaggtgcatctggtagctagggaagatctgcagcagcttctaacgtactaacttaattttccatatataaatttttccatacatttcattctctctttcatttccttcttttttttggaaagaggctagcaatgagcatcacagcataatccactctttcatttccttcttatttctctctttttttttatcatatcttttattttctttcttttgtacttccatttctattttcttttttatctcgatctattcactccatttttgaaaagaagttccagatcataatatgtccatggttaagacaattttcaacttataagaaagagttaataaaatttacttatatatcacgtagaaattagttaggatcgggatggttccaaatcatatagtaattctctattttgaggtagaagtttatcaacatataatttattagaaaataaaatatcacgaacgagactcattaaataataagtaagttttacaattttttgtaatctcaaataaattttagttaataataagaagagtgttcaatagaatgtgttatttctttaatggtttatgtattttaggaatattgtttgcatattttttccacgctagtatataaaatttggttacttcatattgagcaagtataatcttagttaatacgaacttggcctcctttttattattttaaatgtgatttaacaaaattttaattttctctttttgagatgaaatgttgattactattgctaaaatatttttctccctgtatatattaattgttaactttggccaacatacttgtgagagcgcgtcatgctcatattattcaatgattaagggggtgttcttgattaaagattcttgttattgacgtacgttttttttttattaaaaaaaacaaacttgatgttaagttttcgattgacgttaaataagcgagttaggaatgagaaacatcaaaacctagaaaagttgtctgtcgtagctttgttaagccgcaggttggggctattgagcaaaagtaagatgataacatcatccttaccgagcaaaaatcatattgaatttcttttaattaacttcaagccaaaataatctgttactcgttgaagcaaaacttttactgtagattagagcgaaacttttacttgtataaatgcatatgtaagtgtgtcaagtcactattgaatccatacattagtacataagaaaaaaagtaagtaagaaaaatagtatttatttaataatgtaaatagtaaaaggtttttttacacaatgttgaattagaaattgtcaagtatactttaaatactttataaatatttcaaaatttattgaaccaaccataatttttaattgattcacggtgttaataagttttttagactaataatgtaagtatttattaacttacaaatgtggttatttaatgtttgattttcttaagtctgatctttttgagttatatatatatatatatatatatatatatatatatatatatatatatatataannnnnnnnnnnnnnnnnnnnnnnnnnnnnnnnnnncaattacaaaaactaatttcatcatatataagtgtttcccattaaagcaagattgtcttggacagaggatatatacaatttaaacaaaaaataaataaaaattgctcagaacactgtaccataacttgaaggtgttttgatggaagcttcaagagattggacaatatatgagatacagaaatcacagaatcatgtaaatattggaattattcggataaattattcaatattatatactagtattttgtttgtgttgaacattaggctcaaaagacaccataaaaggaagaaagaccatgggggaaacaacagagtcgccccactcatatatgagcaaacaaaattgactgaaaagatggggcgttattgctgcagaatcaaaggagggaccaatatcaaacagtcagattctacaacgactcttccaaagtccatatgctccgccactaccaagccatttaaagatcctgaaaagctaaacccagaaacacaaaacataaatcacctcaaaggaggaccatatacccataataattatgttcatacttcatgcccccacgctctatgacaacatgtaaatcaacataatataataatagttaggtattattaatcagtatttttgagacattaattaagaaaaaggatttattatgaaaaatataagaaaacatgaaagaaattatatacaacacaattttatatattccaataaatatcttttctgtttttaatttcttaactaatatcttaagaacatcatatttgtctaataattatagtttaattaataatattgagtttaaattttaaatttataattactttaaaatttagaagattttttattattatttataataattttatctgacttaaataaaattatcatatgtaaaagatatctatgtaaaaataacccttagtaacccccaaaaaccttcatgcactgccttttgaaagaccaattatattgagcttcgcccctaaggagtcacccaagaaatgaaaagtctattttggagaatttggagtttgagagtagtcttaggaccacactacccttcgcatgattcctggtccaaattcaaatgaagtataaatttagatcacctaatttaacagtgggaaaataggaaaactttttcgatcctgtagtacatttttcctttctaaaaacagaaatcaacacatttagcatgcatgatgtacgattagttctctcttttaaattttttgttgtctcatttgaagctatattattagtgagggagactgaatattccttcccatgaaagaaatggcgttttttaaataaaaaaataaagattaaattgataagtgagtccccataattttaccaaatttttaattatgttcttgaacttttcttttcttaattgtatcttgaatttatttattttttttcaattggatactctgtctaattgctgctataaaaaattaatcatatacacttaattagatgtgtaaagagtggattggtgcttatgaaatatgttataagcataactaaattaattgtaaaagttttagcattctttttagtccaacaattatgaatggtttgtaaaagaatatatgaacttaattcacttgcaaaatacactattagtcatgagttatccagatatagtgtaccacatcaaaacatgtagattgaccaagaccatgaatatgtaatgctccgagacttgcaataattaatttattgcaaattttgcttacgttatttgtccaaattcgtccttagaataattcgtgcctttcatgtaatttggcaaactcagtaatttttttatcgataaatattaatttttataagaaatataagttggcagactcaacgattgattcacatgtcgtgccaaagagaagcatacaatcagattttgccaaccattaagctttgaagcaatgttatcaatatagattcatcttgtgaacgcaattcacacccttttttcttcttctcgtgggtcccttgtagccatttccccagtctactacagtaccatagaccgaatatatatatatatatatatatatatatatatatatgtatgtatatggaatgtatgcattgatttatttttcttttatttgcatttaaaatatggccgctgttttgcttttacgtgtagtacaaagtacgggtcatttcgtctagttttaataaaaagaggagtaaattttgggtatataaatagtatttttaattaaatattttaaaaataaaaataaagtgaattaacataaacccaatatcttaaccttttatttatttttataaacatcatacaactctcttgatttaaacataaaaaaagttatattttctttctttttctttcctttatacatttagaagtaaagagtcaaacttacaacttgttaaatttgagatccttatcttactcatatttgatacatttgtctcctataaataattttacaaagttcctcagtagcaggatcattagcaaagcacttaaacaacgccaaatgtttgtggttgagaaaagccagcgacattaacaatgtttatatatagccacaacatcatacacattcacgaaagcaacctaattaaggcatgtacgtagagtctcagcatcatgggacaagcatgtgaatgccaaacaaattccttctgacacagttaacattccagaataatctagaagctttagtacatatttggatgtccgatgcaattgaaagttgttgacaaaataaagtttacaaaagcatctatagtcttttttttttttttttgtatttagtttaccatgaatcattaaatttgatctctaacgaattcaactaaaaatcaaacatactcttagttgtgaaccacaaatagactctttattcgtttaatacatgtcaattagtcacttccaaatagcattttccaaacataataggatctagagttttacaaacgcatgacaactcatcccatagcaaagcttgttttcgactcatgatattaaggtaacaaccttaccaaaaatacgcaatgatgccacgtggatgtgttgtacatacaaattaaaccaacacgttaaatccctttgcgtttacgttgttgcacccctatcatccgcacgtcccaaccaccacacacacaattcacaaagttcaacaaacatatacaaaatatgaagacaaaataaaaataataacaaaagttttcaactagagaaagaagggaaggttgaaggtggtgaagaaaacaccaccatcaccctaacctttgttaattttccaccaccgtcacctttgttttgcagagatcaaaataatcaacaacaaggttttaaaaaatcatccacaaccgtgatttgagttacaacatcaaaaaatttcaactgtccacaaccacaattaaaatcacatccggttgcatttgtttgcaatttatcgcgatatcaacaaacgcgatcacaccgctactgtaatcgatatttaaaatcttactgatcaacaagttaagagaggggaaaatgagagtatttaaaagagccagtggagccatcaaggacaggaacagcatatgggttgcgaaattctcacgaaagggtccattccacaaccctgatttagaaaccgctataatcaaagctacaagccacgacgatcaccacatagattcaaagaacgtgcaaagagtgttccaatggctacgaacctcgcccttgtacctaaagcctttcgtgtgggtcctctccatgcgcatgcaaaagactcgaagctgggttgtggcgctcaaaggcttgatgctcatccatggcgttttctgcaatgacattcctgtggtgcaacccatggggaggttaccctttgacctttcaaacttctccgatggtcatttgagccccgctaaggcttggagcttcaacgctttcgttcgcgcttattttgcgtatttggataagaggtctgcgtttgtgtcctccgaggttaagccaacgacgaagcaaaagaatgttagaaataaaaagaaggaggtgaaggagacgttgatggaagagcttgaaaacctgcaaaagttgcaagggatgattgacatgcttctccagattaggccaaagaatgagaacttgaacgttggtttgattcttgaggctatggattttgttatagtcgaggttttcggtgtgtatagtaagttttgcaacaagattgcaaaagttttgttgagaatatatggggttggtgggaagatagaagccagtattggcctcaaggttcttcagaaagcatcgattcaagtggaggagatgtctttgttctttgagttttgcaaggatattggggtcctcaatgcgtctcagtgccctaagactgatagaatttctcgggaagatattcaagatcttgagaggataatcagtggtgcttcttccaagaagggtcgtggtgttgtgagaaatgatgaggataataataaggccattatggtgagagattgttcttccactgcatcggttttgcaacataaggagtcagagaatggtttgatgactgtgatcacgcaacaatgggaggtttttgatgatgatcatgtaatggttggtgctaaaggaatggataatgtgtctaatggtgaaaaggctatgattggaaccacaaccaatccttttgaggaatcatatagcatcgtaccttatgtacctgctcactatcaagctcttcctgatctaattagttggtagaatcatggaaccggcgtttatatgttgttcccttttcatttcactagattactatatatgtatattaatatatatactactagggagtccaagttctatctcaattaattgaacacgatacatgaataacaatatcttcaataattatggatcaaaaaaatataccgctggggaaaggaaaatccgaaaagtggaaaccaaaggggtaaaagtttttctgatgcatttctcttctccacattagcagaagatctttgtgaatccccccttcttcagcattaggaaagttttatgacgaagttattatgttcttattgttgttgacatgataattagatattgaaattgcagaacttgtgttgtcatctatttttattttttctcccttaattggatgttaattagctttttatgaaattgaacatttttaagtttagatacaataattagatcatggaactaaccaatttaattttatgcaaaatgtgatggacagatatctttgatgtggcagtataatggaataatggcgattgtcttttttagaaataacagaacataattgatcattatagcttagtacacatgagcgtttaagtaaccagtctattttcaattctgtgttgccatcatgccaattatatctctctacaccaggtcaattgacctatggctcatgaattgtattctttattcatgtttgagtccttcatcgctctcctcgcattgaaagtctcttcttaattctggttaaagcaattttacattttttattatgtcaacaaaccaatttcatgccttgctatgaacactttgctctggacttttgcctatgttgttttctcatacaagtccacccggtaacatgttgtatatgttttcttgtatttgaactttcccatttaagcttgagagtttcaaatccgttggaatcctattcttgttgttttcagatgatttaatttaattgctcaattttttcacacgtctgcgtcgatctctttccttgtacgctctaaaggcattttatctttatgactattcttttgtatagatgtgtttatgttccttgcatgtaagcatcaattttttcatcctctatgtcgcttaacatctaattcatcgccgacatggactcacccatgttattgcattccaaggttaggtaacatgctaaaacattttattttcatcttggctaacacaatgttcctatccactattcaatgctattttggataaaagttggggaaagtatttttgaaaatttcaaagcatatttcccaattctaagtttcaaagtaaaagtacttttgagctctccctattattagaattcaaatatacactcaatcataaattgttttgaactcctattaattatttagtgcaaaattacaacctaattaagtcgcacttgtaaatactgccatctcggttagtctacatcaaagattatttcagttagtaactactaaacacattttggacagtttgattaaatttaggaaagtgaaaaatataagggtacatattacattgacaccctctcctaacgtcaagttgctaacatctattatttgccttcatagtgtagcaagcaggtcggcatggcttcccaatggtagatttgaaatttcttttccaagttgacaatattccctttgaaagcactaccaaatatctagaattaggatacttttcgcattctcctctcttgctctatcaattcagccacaaactcggctatagccaaaattgaagactttagcggatctagttcttataaaataaaattagtagacattataacgctaattgaaacttaaagaaataaaataataaaagacaaaaaaatcattgatatgatatgatataatataacaaaaataagttagaaagaaatagaagatgtatcaaataagtatttgtaatatccatgtgcatgtccatatccatatatgattgttctattagtaatattttttcactcgtgacatttcttgtatttgatatatataacaatattataatattatattataaatatatatttaggtataaattataataaaataaataatatagtttaatatatagtattgaataatattatattatttacattacaatcaacaaaacaaaaagtatttgaaataaaaataaatattatattatttacattacaatcaacaaaacaaaaagtatttaaaataaaaataaaacattatttattatagttatttttattattacataaagtaatactattatggtctaaatataagaagaaaaaatttcttagactcaaatataagtaaaattttaattatttttatcatatttaataatatatctaaaaaatatccttcaattaatcaagatactatttccaacaatcactttttgtttttgatatcaagttctagtgaaggaaattttagaaaaaaaaatatttcttgaatgcaaataaaagaattaactaacttttttttaattaattagcataaagttagttattttttatatttaggtccaaagaagtatcataataatgtcattattttattatattatttagaaaaaatatgttttagtcattatattttttattaaatttgattttagtttctaaattttcaaactgannnnnnnnnnaatgctactaagaatcattaaaagtattgatttgatttttcaaaggaaatggttgttttgtgcgaaaaagttttcgtgaaacatgcacgaacgtgtgttgccgtaaaaatcatatttcctatattttttatttttaaatcaatatttactttaaaaaaacaatagtcttccagattcgtgctggaaatattctaaattgaagaaaacgcatagagcactcgagaaaggaattttaacacattagttaaaacattgggggttaagtttcatttgatttcatttatgaatcatgaattaaaatcaatttaattggactacttgtttcgtctaccaaagtcaacgttgcaactctaataaagttgcttaactgaattttgatggtcttttagtcgcattacatctaagaattttatccannnnnnnnnntagattttttaccgcccaaagttaaagaagagactaaattcaaatattctataaaatttaaggactaaattattaatttgagagtataagaactaaaattaagtttgaccaaaagtataaaaacaaaaaaaaaatatttttcctattatttgtaacaattaaaattgtgaataactaagtatttttctcaaaaatcgaggatcaattactaattcacaaagacaatgctactaagaatcattaaaagtattgatttgatttttcaaaggaaatggttgttttgtgcnnnnnnnnnnctcttacaatataatcaaatatatatggtacgtattacccaaaattatgttatgtttgggaattggtttttggagaggaaaggaaaagaacgacaaatatttatttctaaaaagaattatataatatttataaaaataaaccaaagattgatatattaagttctgctagtctattattttatctttttattttaaaaaattatcaaattagaaataaaaattatattctcctctcattttcttcaaaatccaactctgaaatgtgccatttaaataagaacattttcttaatagtacttttttatataatatcttgaaatgggaccaaaattatatatttaaatgatagaaactcttacaactcaaatcaacatgttgatgcgtagaagaactaaatgaaataataagtatgcatgagaattaaatacgaaagttttaaagttcgtgatgtagtttttacataaaacgccagtggtataaactttttcttcttttaatcatgattatatggattagataggaagaatcaccttttttctaacaagacaaattccaatgcaacttcttttatttctgatgaaagctctctagcattataatttccacttattatttatcctatttttcttatcatgagacttttcgtgcaaacggacgttgaataaaagcaaccctatattacattttttttttatgaagcctttttatgattgatgtggcatatgaatatagaggacaaaaaaatggttaaaggcaccactaacaaaatcatagaaaattgatcaataaaacacaaccacgtaagatttctgattttcaattcgtgggtcgaatcacaaatttcttttcgtgaaaacgggctcgaggtaataccgaacgaacaatcacgagtaaacgctctcaaaaggataaaaaggtgagtctaacaacgaaatgtcaacgcacaaaatccgaatacaattgcttgaaatgataaattgattaaaaatattttaagacattcaattataatgggaagcaagagtaagagtgagacatataaaagattgttaactcttaaaaattactgctctttattagccactagacaactgactcttaattactcaaacagcctctccctctcaaaaacaggacttagcctaccattagttttgttaggcatcataatcttctttcaacttctctatttcaactacattttagtttttcgggtcaaaaaccttttcctccttgtcagccattgaaatcccaaaaaaaaaaaaaaaattcttttatcgatttgtgccaaacaagttaatcgaaatgatggaactcattgttattatttctcacctatttttcactcatctcttctctagttatcttcaaccaaacacttttagtttctcatttattttcactcatcttttttatctcctaccctatttatctcctctacaaacagggcaataatgttaccgtagcctctactatttacagaatgagtataattttggccaacattgccaactaatgccaacatgttctgactattgctctatgaaagtaacctagttataatggaaacctatgaagaccaacttcctaattttgaatcggtaatagctgacttaatgccactactgcctcacaagagctaactaaaataaggggcaattggcattctatagagagtaaaaagatcgcgggtatctaatcatgccacttgtttctatttatgcaactcattgttatacttcaaaatttgaggtttaaaaaatatgctggactgcataatcgcaaggcatctcagatgtgattattgccttccaattgtgttatgggggagaaaaatactttgaaaaaatttcagctttcctgtccaaaagatatagctcaaccagattatggggaacaacctttttattaaattatttcccattatgtctctagactgttcagaacaggactgagaaatagataagataaaggccataaaatggtatagaatcatgaataaacagaatagatgactaattcaatggacaatagcactgaattaattgacaacaaacagtataaattcatccaaaattaacagagtaactcacaagggatacaatgcttatgcaatgaggtccctatcctgcaagtcccaggttttaatctcattgatatcatatagggtgtgattataggagaggaataggctcttacccccattatgcaacctctaaatccttggaaggatttgtcaggttttacatagtctactagaactgcaactgaaagattatccacacctaatgaagcacacttcaagaagcatccacttataggattgttaatgaactatacacaactaaaaaactgaggggctaagtcaaacaaacaaaggcaatgtgtaactgacaaaccaataagccaaaggaatgatgaaaagttaattcacaaaaaatcatagcatcgaaaaatcttaacaattttaaattaaaatgtgaaggagaattatccaaagctagtctatctagttataactcatctacataaatgttgatgccatataacatggttgtcccttatcacataaaagctgaagagggaaaaagaacaaaagaaccggaatatccaaattttaggtagaagtaccacaacagaaaaatcttggataacaaataactcaacatctgtgtgaaagaccacacaggtgtatatacaggtgaaacagaccaaatgtcatgtgtctcaacagcacctatctacctgatagtgacaaacttgttggtgccatgtctggcccaatgagtcttcagatcaatagggttagcaaagttataaccttcagctgcaagtttctctaaaacctttttaaaagcaccttggctcattttccgcccagctatccttgcaccacgccttttcatgctcattggcaaaggatatatcgacacatttgtggtgcaacaagccgattgccaacctccgcagccccaccgataacactgctgaggagccccagtgcacgaacaaaccggaataggtagaccagaaatgtccatatcaattccattaatcacaagctccatggtcttcttcggtggcttcgcacgttgaactggagcattgccattatccttcggcttcctaggtttcttagcttttggagtcgacagagcacccttagtttgccttttctttgacaggccaccttcctttttgacaactacctcttcgactctatccactttctcgtctcttgacgtatcaggtggttgtataatttgcaagttaggagctcccgatgtctctggaagaacagcataattaggattagtgggctgctgcatattaaaaaacctatctctttggtttatccaattatctctgacatagttcaatggcattggtgcttctgaaacaacacaatctcgtgggtgaaaagttccacttgcacccattaacatagccggatcacgaccaggcaaaaatggctttgtgtctcgtccagtcattccaggcatgagctgaagaccaagatgtccccctctgaagggttcataataaccccaattgggcatgttcagcacatcatcatcatccatgacaactacacacaacacaaaacaaaggatcataaagtttcaaaacatatcctttgcttcttctttcaatgtccaccattaaaacaatcttaaacaaacaagcaacatataccatgaactaataatacacaaacacttcaacggggaaattaaattccagatagacaaaacaccacgcaatttaattgaaaaatgagaaaataccaaaaacccaaaatcacaaattcaacaaaaattgaaaatgtcttaagattcccgaaaccaaattctcaaatcaggctcaaataagtccagattcactgttcccgagtgaaaaagatcggaacttgctcgatctaatcgccgcaaaacgaaaaccccacgatctgaacgccattacgatccctacatttcctcacacaccaaacacagcacacaaaagacgagctcggcgtgcagatccccaattcccattttagggttccaaaatttgggactagatctcgctcgttatggccaaggaaaacaaattcacagcacaaatgatttacattgaggctcagtggtagaagaaggaccccatcaatttcaaatttttaaggaaagcgagggagagaaggggagagagggtgggagagagagaattagaaagcgcaaagagagagagaaggagaaagcgcagagagagagagagaagaggtaggagagagaaaacttacttggtgggtgcaaacggtctttaggtttgcccttccggagagagaaagatgagagagacagaaatctgaaagagagagaaagatagaggagagaggagagagaaagatagaggagagaggagcaataggaaaggagagagagaagcggggttaaaaaatagggtatgtatgggcatatataatatactttgccacgctcgttttaaacaatatatatgaatatgtatttttggactttttctaatttcatataactagcttttgagttttgctaagcacgcatatagaaagagggatttttaaaaattaggagagagggcgatggggacaacataaattgggagaaaaaaaaatatgttgggctttgtatagaacttgccttgttctcgtaaaaaaaaaagaagaagatagaacttgccttgttcatgccagattttcttaatccattgaatgtgtaactccctcatgtcaatctcaatgccttttaaggttgatcctttttttagaagataaatccataatctatgtttatatttcaatcatagaagtagcaagaggtggatgagaaaatagtatagcatgtttggtttaaaattatattgactaaataatcagtttaaggataatattggtaaaattttgtttagttatgtcttcctcaaacgtaagatttttcattttttttttcattgcaactatttataaatagtggtataccttcaattaattttaaaatattaaaatataagttactttattataatgatttcctaatcttatgtaccgtataaatagatttaaaattaaaagaaaataatgtagtaggtttttttatgtaatgaattcctctttccttaataaaaaaacattctattttgaataatatgttctcaaaattagtctctaaaatttcaaatataatttaatttagtttatgaaactacaaaaatgttatgttatgttatactttcaaattactagatgtaaattattttaatatttattgttgtagcttcaagggataaaataataaaaacttgataactttagggtatacaataatatttttataattttaagaattaaattgactagttgttgtaattttgaggactaaataatgagatcatgatgatatcacaagctattaagatcaaatcatagtagaattggtgngttatcttgtattattagtcttcgatcatctagcatcagtttaaggagtataaacataatcttatgtgatttgttatatgaatcaatcgtatagtccaatcttaagaaattttgttgtaccatgccacaatgatttatttagagttttaaaattgaattaggatcaatcattaagaaagaataagaagtattttaatcaaataaggcttagagagacacaaaactttgatttatagggaatttgagctgaaagacttgagtccgaaaaatgaagactcaaatcccacaatccaaacctaagtctaaaatcatcaaattcaagtttacactaatagaacttgtaaagacttgaatccctcctaaaaagacttgtgattctcataagtttttgaggtttttggacaagtttttcaaatccaaatcaaactattattttctattgtggcttgagccttaaaagataaaagattatattttttttatcaattatgttatatcaatttgaattacaaactaaccttctataagtataaaaaacaaccttaaattttgtttgtgctcaaaatttgaagttcacaccttaaatttcaccaagcaggatggatcaacctaacctaatttgccacagctaacaaagataacaagaagcaacgaagattaagcagaaggtggagagtggttgaggaacgtgtgaaaagagatgagataacatttaaaatttaactaaaactagaaaactttctttttctattttccaaaaagtgagttaaaatagttttaaaattatttaaaaccaattcaatcccttattttctaaaaaaaaaatgttttcaaaattaaatttgaaaataaaaaattaggcattcacaacacttcatatagagccttacattttttgtgcatgtgtataatgacaaccaacaaagtttgaatttaagacttcatataaattgcccacactcctactactaggtcaacctagtaaatttttcttaacattttaattacgagaggaatttgataacataatctttaatatacttttaaatgtttttattattgaataaattttatataaatcctgttagatatagagtaaaataaaattatcttacgagacttaattacatagaatccaccggattgtaaatactatatttaaaattagtgtattattggtattttttgttattaaaaataattataactcttgtatgtaagattgtaaataagttacattatacatgaaatattcaaactaaactcatacnnnnnnnnnnnnnnnnnnnnnnnnnnnnnnnnnnnnnnnnnnnnnnnnnnnnnnnnnnnnnnnnnnnnnnnnnnnnnnnnnnnnnnnnnnnnnnnnnnnnnnnnnnnnnnnnnnnnnnnnnnnnnnnnnnnnnnnnnnnnnnnnnnnnnnnnnnnnnnnnnnnnnnnnnnnnnnnnnnnnnnnnnnnnnnnnnnnnnnnnnnnnnnnnnnnnnnnnnnnnnnnnttaagtttatatatatatatatatatatatatatatatataagaaaaagtttatcaagttgaagtgcttctatttgcatttgaacgcatggcataatttgagtcttgcaaagtcattagtatgcaaaaaaaaattgataaatattcattttcgttcttgaatgtataaaatattgacaatataatacttaaaagatgaaaattcaaattttagtctcaaaagtataaaaagtgtaacaaattcatccatcagttaattattgtttttaccattaatgaaaaagtttaatggcataaagggacaaaaatattataaaaatgattgtcaacatggcttatgaatagattttggacaaaaatattagtaagttatcattagacgaaaatgtcaataattttctattggaccaaaatgtcagtaagttacannnnnnnnnnnnnnnnnnnnnnnnnnnnnnnnnnnnnnnnnnnnnnnnnnnnnnnnnnnnnnnnnnnnnnnnnnnnnnnnnnnnnnnnnnnnnnnnnnnnnnnnnnnnnnnnnnnnnnnnnnnnnntattaaacttgaattaagtcatcaacattccactaactttatttatttattataataatatttacaataactttattatcataaacttatatagaatattttgatcccactgttacttctctagagctgtccatacagttcgtattaaagtatataaagagattataaaagtgatattactctaaatcctaaaagtattgggcttaataagtaagaaaaacattaattaatatttagaaatctttcttcttactcattttctatgtagaaacaattttcctaatgcttaaatatattttttatcccataaatttagaccaattttcctttttgatttctcaaactgaaaaatatttttcttagtatcttaaattaaaaatgactcacttttgatctttaatttgtgaattgtgatcttagactgannnnnnnnnngaaaatgctcagtgacacaaacacaagcatacaagatattagaataacgttacaacaatgcaacatatataaacaatgaaagatccacatgtacgctaaacactggctacattaacaattagcaccttgaaattacaaacaccaaagacagagatatcactaactcccattacaaagaaacctggatagagcctcgagcttttgttaaaattttctttccgttgtaattcctttaagatctacatgtgttcaccaaactcactttttttatttttataagagttcagtcccaataaggactctaacaagcttccctgaaaaggggaagatgatagacgatgatatacacaaagagaatgacgatacaggtaatcagtgagactaataggaaaaaaaaagtattggactataagtgtaaagataaaatttcacattagataaaaataaaaaagttaaacaatatataaataaggacaagatcaataaactcaaatcttaaaattttagattaaagtgtgacatcaaatttatgtatgtggtttgttctagatccaatggtgtagatctttctagtgtttatctccattggttttccaacaaagagaaagagatgaagatggtagttggaaaaggggaggagagatcgagaaagaggtggtggctggtggaggaggtgagggggtggtggtgagaaaaaagaattttggcacgaggacttcttgggccgttgaatctcaatattgaggccgaacaatctcttttcttgggccactgacgacaattacttcctgcattctccaaattgcttccatattacttctggaatgatcgttccaaaagtaatatgggaagtgcagaaaaaaacaccagccactaacctgacttgacgttgaagaggtccatttcccaatcaaaatcatttcttcatattacccgagtttcttgtaataagtgaatttctttcgatttaaaatttatttttaatttattcaagatggaaatgtaatccagtgagaggctcataattaccatcgtgggggagagggagagcgcaagcttatcacatgactgtaaaagcttttccacaattaaaagttaggaccaccaagttacaatgtaacaacatcactattatattgtggcaatgctaagatcagaactttaatcagaactgaactttaattttagtcgattttattacttccaccaagtgtttttaattgggtgtgtgtatgagggattacttaagtatagtattctttcttaaaaaaaaaaaagtgtagttttcttgttaaatgaatgctctctttttttttttcttctttttatctaccaattaacaagtacacgttctcctcctctttgcctatcttaaattatcatttactttttcatgcatgtatttatttggtatgtgacccaatgtgcaagtacctgttaaggtccaaaaataaggtcgaccagcctttgattcggcaagctaggctttctattttgtagaatctctttttcataatctagtttgccattccacctgaatatcctaaagttggccaatgagttacttggcttgtttcatgagttccggttttcatacgtacaaagtagataaccaatcctttatttaactaaaatatcattaattaattaaatggagcatagacaaacttaaatatgaccttttgtacataagaatgcgtagacttttataattttatctatcaaatctatcaatgtcataaactatcaccacccccacccacattttacaagaagtttaaaatcaattaggctcacattttgattcatgataatacaaaggaatcaatttcaaacaattaacacttcaaaaagaaattgatatgctcttaggaggataaatactgataggtattggcctaaggtttgaagctagataaatnnnnnnnnnnctcacattttgattcatgataatacaaaggaatcaatttcaaacaattaacacttcaaaaagatatgctcttaggaggataaatactgataggtattggcctaaggtttgaagctagataaattagttaggaaatgtacctcccctagagttattgaattttgaaatacattaatataagttgtttgtaatgagactgctcattaacgtagacatattttttctaagaagataaaaaaaatggttttcaggctagttgtcaacatgaatgacggaaattgcagagcctgagatggatcctacgatgacgatgtcgccatttgcctatcaaaactaacagaggacaaggtgagataaaacactaaacaaaccatacttgctaaaaaaatttaggaacaattttaggtgttttaattgtgacacacttaaatcgtgttgttaggattcaaagctataacaaagaagaaataagggaatatattaaaggcaaaaatggagagatcctgagaggatatgatggtgataaattgacatttttaaaaccaatggaaatcttgattttgaaggttgaagctactgcagtgtgccatagtgacaatgcgttgtagttgggtcctacaatcctaatgccgagtaaaagggtaatcttgctgagattttctagttttacaaggcaaaagaaatagcattggtgagattcttttgctcataagttgggtcccaggtcttggttttccttccttttctattttgtacagtttttttgcagtctataatcatttcattgcacgggtaattaaactaatacaagcattgtactattcaaattaaattactatattctaagatgtgttatctttttgcagagtaaaacatagtatttaactgttaaagtgcgtcagagagggaacattgtgcataagcctaagttgacctatatggatggataaataacacattgggatagtagtaatgatggctcaaggagttattgaaacgtacgtgtgtgactgtattattgaaatgaataatgtttggaacacaccttcattctaataatagacaccaccaaggaagagaatgaattaagaaaaatgtaaatatgatactgataaaatgtgatgtccacattttaaaaaatatccaaatacaatgaaaaaaactatttaaaatgtatacttaggaagtgatattatgataatgaggatatgtattaaattatatataatttaatgacatcaatagtaaagaaaatcaagatatgaagatatgaggttagttcaatgattagagaaggataaaggaaaaagaaaggagacataaataatatgtttgaatctttcaactaacatttataataaaattaacaattctactaatgagcaaaaattaaacaattttttttatcggtagaagttaattgttaattgttagttttttgttagtaaaaaatttgaatcccttctccctttcccaccaaccaagccaaccttataagttaaccaaagcaaaatggaagagcaaccaaaatagtttacacagtagcaaaacaaaatttgtgtcaacagaaaacacaagtaaaattgaaggattaattagtaatacaggagagcttaaaaatgaggtggaaaggacttaaaagggaaaaaaatagcaagggaaaatcccttaatcatttagggttaaattggacgctaaatatcatagtgaatcgttattgtatttccaatgaatacaacaatgatgtcaataagtcattgaaaaggtgaacaaatatgtgtgaaaatgtactttatattttagagtgaatggtatgtatatttgactnnnnnnnnnnccttaatcatttagggttaaattggacgctaaatatcatagtgaatcgttattgtatttccaacgaatacaacaatgatgtcaacaagtcattgaaaaggtgaacaaatatgtgtgaaaatgtacttcatattttagagtgaatggtatgtatatttgactcgaacatagagaagtataattgcgggacaaatgaattgaattcaatatatattcttgcactttttaggaaggaagctagcatccttaattacacaatcccataaataagttggaatgaatatatgaccaatcatttatcatgaacttgttctatataaaatatatatttattaaatatatcttgtaacttaaaatatacaaataattagataatattaaattcggctctaacaggccaagaaaaaaatataatttaataaataaattttaaatttttgcatacataaaatatacaaataaaacttcaatattatgtatacataatgcttttttatagataaaaataaatataactataccgaatacaaaaataatactatgtttgattttttatataagaaatgatgatatgtttctcccttgttctaattatataaacatagtttcatttttaaatgtatttttaaataaaaaaattacagtaaaaaatgtgttaattatatattttcttttataacactaacttattatgaagtttattaaagatacaatcaagcatttcactaatggatgcatgcattaattgattaccaaattaagttacactcattaatgaaaaaatacattccttaaattaggaatattgatattaaatacacttaaactatttaattctatgataatgttaattaaaattaaataacttaattattttattagttttgataaattaatcatatataagaaaagaaagaaattagatagataaaataattttggataattatatctcaacatcataaataatctattaaaacttataattttttcttaactcatttttttattgcatcatgttacttatcatatttatatttttattcttctcctttttctcttcttaatgacaactaacacagtaaattcatgtattgtttttcaataattttttttataaattttaaggggttcataatattttttataataatataaacacattttaaaaacttgggaggattgggttcaacaagcaatcgatatttcaggattaagtatgtagtattctttgtaataatagttcttattcatcgtattaacaatcaaaaaataattgtttgtctatgtttggatgagaagcaagaaataattaattgttattttttcactaaattaacattttgttcattaatggaggagacaaaattgatctggtccaacatgttggaccgaattgggctctaaaattagtggtaaatagagttaaactaatttggcttggcttggtaaatcaagtgggataagcttgtaaaaaattgacatgaaaattattgggtaaggtagaatgttattaatttattattttcctcttaaaaattaaataaattagacaaaaaatatgacccaatttggcctagttcgacgagtcaactggccacacacacacataatgaagattataagtattctttacaaaatgcaattctacttaagtttgataagactaaaataaataatagaactcttccacaaagtacttaacaccaccatatatgaaatatttaagctcgacaccactaattaaattgaaactatctcatgttaattgattcacaaattacatgtattttaagtaaatgttaaataagtttttgatttctataaaatttttgtttcctgtaatttagtctctatatacatttttgctctattttagtctattgtttatttttagtcatcagtatgaaattaaaattggtaagaaaataaaaaaaattgatccacaataactaatattaatggctaataaatgaagaaaaacaaaataatattattatttttctaaaatgataattttctcacaaagactaaaatttaaaaaaaaagtaaaagtgataaaaaaaatcaagtgaagtggctatggttacaaataaagaagacattttagctgactgggactggacaatattaccatacacatgtgttgggtaaagtttcttaagtttatatatnnnnnnnnnnnnnnnnnnnnnnnnnnnnnnnnnnnnnnnnnnnnnnnnnnnnnnnnnnnnnnnnnnnnnnnnnnnnnnnnnnnnnnnnnnnnnnnnnnnnnnnnnnnnnnnnnnnnnnnnnnnnnnnnnnnnnnnnnnnnnnnnnnnnnnnnnnnnnnnnnnnnnnnnnnnnnnnnnnnnnnnnnnnnnnnnnnnnnnnnnnnnnnnnnnnnnnnnnnnnnnnnnnnnnnnnnnnnnnnnnnnnnnnnnnnnnnnnnnnnnnnnnnnnnnnnnnnnnnnnnnnnnnnnnnnnnnnnnnnnnnnnnnnnnnnnnnnnnnnnnnnnnnnnnnnnnnnnnnnnnnnnnnnnnnnnnnnnnnnnnnnnnnnnnnnnnnnnnnnnnnnnnnnnnnnnnnnnnnnnnnnnnnnnnnnnnnnnnnnnnnnnnnnnnnnnnnnnnnnnnnnnnnnnnnnnnnnnnnnnnnaaatgtcaataattttctattggaccaaaatgtcagtaagttacaattgaaccaaaatgtcattaatttttctgagactagaatgttagtacgttttcattggatcaaaatgtaattaagtaatcatttgactaaaatgtaagtaatttttcattggatcaaatgtcagtaattttttgttgaaccaaaatgtcaacaagtttctattgcactaatttgtgaccccaaatttcattttatttaagtgtaaaatataatttaaaggtaaatcatcattcctctttttatcattgcaagcataacaataacattacaataatcacttaaaaaaataggaaagtaaacatatgttaaaagaaacataataataatcatactattgattaataaccataatttgtttgtaaaaatagaaaatatccaaaataaacattcatacactattgtgtgcatattattatagttattaatcaatattatgattattattatgtttcttttaacttatgcttattatcctattattttaattgattattgtaatgttattgttatgcttgcaatgataaaaaaaaaggagagaacatttacccttaaattatattttacccttaaatgaaacgaaagttggtgtttgacaaattagtccaatagaaatggattgacattttggtctaataaaaaattactgacattttaatccaatggaaaattactaacattttggtcaaatggttacttactgacattttggtccaatggaaaattactgacattttggttcaatgaaaaattactacattttagtctaatggtaacttactgacattttggtccaataaaaaattattgacattttcgttcaatagtaacttactgacattttcgtccaaaatctattcagcaaccatattggcaattatttttgtgatatttttatccatttgtgtcacgtaagctctttcattaacagtaaatgacggaagttatcagatgaatggatttgttacactttgtacactttcaaggattaaaatttgaattttcatctttcaaaatgaatttgttaacattctacacattcagggacgaaaatgactatttatccaaaaaaaaaaagacaagatgcaagttgtaacaccccgtgtgcacccggtgtattagcattatgattattatcagattagcgcttaaacactgtaattaaaacttttcgcggaagcataaatcaaaaccatatttcttgattacatctcatcacaagcataagataaacccctgctagtccagatcatacaaccaataaccataggcagatatactcaaattatctcaacatataaacaggagaaaacatcaattacataacataactggttatgtacacaaacaacatctgacactagcggtgtctatacaaaagaataagcatccacatgctttctgatctcaccgatccttcctcacacgagggcatacaaggtctatacaaatacaacataaaacatgtgtacacacacacgtcttccctctacaggggtacaaaacagcatcaaaagctgagccaccaagctctcctcaagctgcctcacagccaagcatatgttgtctctactggggcctcccgccctgagactgctcctctctgccagaaccgtcacctgaaaccacataagccccacacagggtgagataaacatctcagtaagctcagggtccttggaggcatctcctccaccttggctcactctccatgacacaagtcatcaggcatcacaaacaagctggcctcccggccctcatatcaatacaagcaagctatcttgctctatgtacgacggatttcatcaacgccaacctcagtgtgagaccggaactcacacccgtgccatcccatcgggagctacccctgacgcatggacgcacatatatggtacctccgagaatagaaggaatgtcccatctcctatctcttggtcttgagggatcaccgacctctgggatctcatcaaccatgagcaaaccaaactaggaggaaacccatctcctagggaggtccatatctatttaactggctagaagatctaaataacaggcttcatacatatctaaagcacagatacaagcatatatatcatcatgagtatgcaatatccaataatgcatgtatcatgaatatgaccatcactccacccggagtgtggtgtggcacaaaggagtgggaaacatccccaagggaccaagaacttacctggcaaagctgagctctgcagttctttccctgctctgtggcacccgccaccgacacccttggtgtcacgccttatacaaggcatatcggctcatatcgaacgtcaagccagaacaagcatacaagcttaagcatataacacggttctcaaccgtctcaaagaaaggaacctcaatctcttccaactacaaggtcagctaacctaaggttcaccaagtctcaacactcaaagccatatcatagaccctcggcggtctatctcatgcccaaaaggcacttgagtcgtcacaaggctcggtgcaagccaacatcaagagctcaaagctctacataagctcacacatggcttgaacggttctttcacacacaagacaccgttctaacagcctcctaagcatatcaaaaccaccaaccaaggttctagcatgtcaccacatagctaagcaactcagcacacaactagacatgcatatcatagagccaagaaatcaaagttcaccaaactcacaattgagagctaatcctacatcctcacaacattctaaacacatgattccaaaggacccaaggctaatactagctttatcacaagtgggtcactattcacccaaaaccccaactcacaaatcaagcggtgaatctcgagtttcttacctcaaagatgacaaggaaggcccaaggacaactctccctagcttgggtaaccacgaatcgctgtcgttcctcgccgaactcgagttctacgaacctcccttgagaaagggattctcaaaatgagtgggtttgaagggagaatgaggaaggattcaagctctacaagtgtttttcatcatgaatggtgtttaaaggacttgatttggtgaactatggtgaagaaatgaaacttggagcttcaacaatggaggtggggtgctggcggaagaagaaggaaatgttttccttctgaaaatcgcgattccctctttatatagtggtcctgtcaaagttgtcgcgctgatagcgccactatggcgctgatcacgctagatcccaggaaccatggcgccgtctgtgccatccccgcgcccagagcaccatcctccagtacctgtggcgccactcgcgccgccttggcgccccgggcgtcaaccaccagaacctatgtcgcctggcgccaggagcgccgcagttctgcagaatcctgcgctgttcacgcccaaaactcgcgctgtacgcgctgggactcagagttattatacaagttattttatcgtgacgtcattggggccggatcttgttgaaaacaactgagtatagaaatagtttcaagattaggggtgtcataagaaattgatttggacgatttgagttggtttattaagtgagttaattttatttgactcacttatttttttatccaaaaaatatataattcagctcaactgctcatgccatcatagtttggttgataggttatgcgagttgactcacttttagaaaataaaaatataaaagaaaaatagaaaaacttaaatacaaaaatataaaaaaacataaatacaaaaaaaatctataacatactaatttattgtattaataacaaactcaatgaataggaaaataaaataaaattctcaaggaaaattatgataaaaaattaaaataaatagtttcacacagtttggcttgatgataattgttatgcatacacaaattttacatttaaatcatataacaattatcttatttttcctcttttaacgcttcttttgtgagtaaaacgtaagagtttagctttttatgagtttttattcagttgatgctaaaattagttgatttatagtgtgttggttatattttttattttttgtagaaaatgatacaacagagacatgaaagatggattgaagatctggaatagcgcgcaaatgcgggcttagcgcgaggccaatttcaaaaaacatgacagttgacattttgaagaataaaaaggggaaaacatttggaaaaaggagagagacagaaacaagagctagggcacgaagaagtgggaaaacccactcccttaaggactccttcctccattttcttccaagtgtttgtgttctatctttttattgtgttatgcttaattataggaccggtcctgaaaattctttggcccggggcgaagtggaaaaaatgggcccctaccatactttttttttgaaatacaaataatattaaaactaagggatggaaaaaacggacccttaacacacaaattttttgaaatacaaataatattaaaattaagagatggaaaaaatgggccttaacacacaaattttttgaaatacaaataatattaaaactagggatgaaaaaaatgagtctctaacacacaaaaaatggatccctaacttacaaattttttaaaatacaaataatattaaaattaacggatgaaaaaaatgagccgctgacacataaattttttgaaatacaaataatattaaaactaagggatgaaaaaaatgagcctctaatacacaaattttttgaaatacaaataatattaaaattaagagatggaaaaaatgggcccctaacacacaaaatggacccctaacatagattttatttttattttattgtttataataaaaaaatttacttacactaccggcccaaaaacttttgggccctgggcggaagccctgttggccctgccccagggccgggtctgcttaattatctttatttatgttgaattttatgtttctgcattagtattagacaaatatcaactttaattcattgtgtgttaaaattaaaaatatataaacttcgagtacaatcaaagtccttatggattcaacactcgaacttatcattttattattatttggacaaattggtatgtttgccaaagtgttaacactcgacttatcttatgttagtgcatataaattgtgagtttattaggaatgacaatagagtaatatcaattttcaaatttgtgtttaaaagtaatagttgtatttgatttatacatgcgtaattttaatctcgatcctcatattcgtgtttaaaattctgttcaatagtctatgtatgttattgattttttatttcattcaaaaccttgaattttaaacgagaacaaatatttgtattataaatataaaacagttttgtgtgcatttgatacacaataaagtaaagcataatgagaataacatagaataaatatttaagatagaagtcaacttcttttctaatgtattgttttggtaaattatgaataacacaaacaaaataaatatattaaaaattaaatcgatgtttaaattttttattttaacaatataaaattattccttaaaaaataatataaaattattttaaagttttagttcatgatttctttctctttaaattataatccattgataatacatgcttagttttcgtaagaaattatatgatttcgattagacatttttttaaaattgcctatgttgatgtaattgatttgattaattaatttgtatatcttctactagttggatnnnnnnnnnnaatattaaaattaagagatggaaaaaatgggcccctaacacacaaaatggacccctaacatagattttatttttattttattgtttataataaaaaaatttacttacactaccggcccaaaaacttttgggccctgggcggaagccctgttggccctgccccagggccgggtctgcttaattatctttatttatgttgaattttatgtttctgcattagtattagacaaatatcaactttaattcattgtgtgttaaaattaaaaatatataaacttcgagtacaatcaaagtccttatggattcaacactcgaacttatcattttattattatttggacaaattggtatgtttgccaaagtgttaacactcgacttatcttatgttagtgcatataaattgtgagtttattaggaatgacaatagagtaatatcaattttcaaatttgtgtttaaaagtaatagttgtatttgatttatacatgcgtaattttaatctcgatcctcatattcgtgtttaaaattctgttcaatagtctatgtatgttattgattttttatttcattcaaaaccttgaattttaaacgagaacaaatatttgtattataaatataaaacagttttgtgtgcatttgatacacaataaagtaaagcataatgagaataacatagaataaatatttaagatagaagtcaacttcttttctaatgtattgttttggtaaattatgaataacacaaacaaaataaatatattaaaaattaaatcgatgtttaaattttttattttaacaatataaaattattccttaaaaaataatataaaattattttaaagttttagttcatgatttctttctctttaaattataatccattgataatacatgcttagttttcgtaagaaattatatgatttcgattagacatttttttaaaattgcctatgttgatgtaattgatttgattaattaatttgtatatcttctactagttggatgtggtgtgagtgatttgccattctccttacacttggatgcaacacaacatctctagaatatatattcatattttctctccaaaattggcggaagtgttgagtctgccgcccgattgattcgccaatggcaactgaattttcattgtaccacactatctatcctaccattagagttggtctcagcacgcagatgtcacgtgagagatggggtggggacgtgggctgtgatatgaggtcacgcatatataacacaacgttaacggggtctttggcccacacacacacacacacacacacacacacacacacacacacacatatatatatatatatatatatattcatgcaagcaaattacagtgccatgaacgaaataatgactactatgctgttgttttcttcttcttatgtggttggatggatcagagatgaggatgttttttttgttcctgtccaaaattccgaattccgcgtgtgggggctcaagctttcaaccaaatgtttgattnnnnnnnnnnnnnnnnnnnnnnnnnnnnnnnnnnnnnnnnnnnnnnnnnnnnnnnnnnnccatgaacgaaataatgactactatgctgttgttttcttcttcttatgtggttggatggatcaaagatgaggatgttttttttgttcctgtccaatattccgcgtgtgggggctcaagctttcaaccaaacgtttgattagattgggtcagttccaagcaaaaaagacacacacacgacacacccctctctctctctctctcacacacacacacacacacacacactatagagggagctttataaacaagacttgccttcaacctttacctgctcgaggtgaggggtcaatgaaacaacacaacaaagcaagaaagctcgtggcaaagaaaaagctagcaaaaaaaaaaaagccttaaagaaagctgattacataaaagcaatacctttctctctttctctattatttctattatctctatttcttccttcagttgtgccactatcattcctcatcttctttccatacgagtaaagctgaaaaccccactattgcaacctcacaacttgtactagttttgagaatttgatcgtgtgctaacatatagtcctcaaagcataaaaattttccacccatgttagacaacaacaacaacagtgcttctaattctggtgcaccatcttcttctgatgccgcctttgcattatctgaaaatggggtggctaacaacaaaaggaaaagaagacccgcaggcacacccggtaaaagttttttccttttgtataggggttcaagttttttcaacttccaagcttttttttttaaaaaaaaattcgttgggtttggttttctctccaaagttaatttcttttttgttgttcttgcagatccagatgccgaggttgtgtctctctcaccaaccaccttgctggaatctgacagatatgtttgtgagatctgcaaccaagggttccagagggaccagaatcttcaaatgcacaggaggaggcacaaggtgccatggaagctgttaaagagggaaacagcacaagggcagaataagaagagggtgtttgtgtgccctgagccaagctgcttgcaccatgacccttgccatgctcttggggaccttgtgggaatcaagaagcacttcagaaggaagcacagcaatcacaagcagtgggtgtgtgacaagtgctccaaagggtatgctgttcaatctgattacaaggctcacatcaaaacctgtggcaccaggggccattcctgtgactgtggccgtgtcttttccaggtttattaattagtttctttttgttttattttcccacttctcagttctcacacaaacatacacctttgtgtgttgtttgtctattattccaagtttccatctctcccctttcttgatttctgtgtttgtttttttttgggctcctcagattcagccccctgctcagcaattgtttttgctctcaataatagaagccaagttactactataattgttattattttactttttaaattatatatatataattatactatatgattatggtcaaaccctaaaattctaggtacaaggatggtgcagagaaacaaaaattctgaatctcagatacctttcatgtgaaagatttcccatcttctagaggttattaatattttatttattctagtttgcaacttcaaaaacatgtaagttgaaaattttcaaattcctaagcattatgttatgcatatgaatattacatatatacaccccaatccatctcattcaggccttgtacttggtgttcctgagcagcttttcagtttaagggcagtctatctccaattatccacacgtccattgattacttaagataaatccatatataggagggaaagtttattcttttcattctttttttgaacttatgaagaccccattaattagaatattagatcactctgagatattttattttgttgcactattcaatttaaacatgaccatagaatccatgtattataactagatctttgattagtcattttttttgttgcttcatgcttgtttttaaacactacattaacaggttttcatacatgtatatctttgtttgacagttttttttctctctctagccaattatatattcagagacaacaagatgaagccattacacatatatatcataatctaatctattttaattacctaaacttttgtcctttacagggtggagagtttcatagaacaccaagatgcatgcactgtccggcagcatcggccagagttacaagcacttcaaccagcatgctcttctagaacagcttcaagcgcaagtccctctagtgaggcaaactttagcatagccccaccattgcaaggacttccagtaccgccaaaaccagctgaacaaccagcaacgacagtcttattaacgtcagagatacacaataacaagtccaccacctcgcataacttagaacttcagctcttaccctcctcaataaattctcaagaaaaacgaagtccaaaggaaaactatggcttgaaactttcaataggctcatgtagaaatgacaaagggaacaatgaaccaacagacagagcatgttcagaagcacataggagcccaccagaaagaaataataataatgtgagtgactattccacattggaagtggcaaggttgaaggagtttgcaggagaggaacttaagttggccatggcagaaaaggcttgtgcagaagaggctagaagagaggccaaacgccaaactgatatagctgaacttgagtttgagaatgccaaaaggataaggaaacaagcacaagctgaccttgcaaaggctgaagagctgagaaagcaagccatcaagaagataagttccactgttaaggaaataacatgccacacttgcaagcaacagtttcagtcttcaattgttggagttccatcatcagaagaaacctccattgtgatgagttacatgtcctcagccaccacagaaggagaagcagaatgagtgacatatactgtgaccagaacacactgtgctaggaaaagaaagaaaagacaagctttattctgcctaagggaaagatatgatatgatgatatcacaggaggagtttacatgaagttatattgttcttaattttttcttattcatttttctctttaatgttttcttctctcttgactaggtgaaatttgttttattttaaagaaagttcatattctttatattttttttatcgagatgcagtgtttaggagtttgagagtctgactattgaagctttctttaaaggtgagttgtaacttgtttttcatgatcattatttgacatattcatcatccgttcatttgttgtatgacaattaaaattgaagaccatgcaaagatagctttacccttatgtctaacctaatatatacatgaaaggcaacttttgcaattttattgtaattagagggtaccctatatttctcttcaataataactaattaattcaaaatactggctggatttcacttatttgtggcttaaattgtactaactagaaaacaatagttgttttaacagcaattaatgtagattctaattccggattagagtaaggaaaattgaaacaagagagagaaaggacatatctcttccagggtttgattaatgattatatttggaagtacccggtaaatgtggatttttgggattacacattagaggcaatgcatgcatgtggtgaggaaaaaaagaagaattgtttattaattattacttattttcagaaaaaatggtggcgttaaatgttattaatgttataggagtgaagtatgatgttattgatatatgtcaggttgccttgtacacatggaccctttaggtaatattaaatgaatgatacatgtgacattcatccgggtgaatgatagcaatgggttgggaccattttttttaaaattgatttattttctgtataggaaccaaaatcaaagggggggctaaataaatctttcttttgatgagggaaaacaaaaaggagaaaagggtgaaaagacggaagggtcgttttcattgcataaacgatccttttaaatgcacaggttatgtataataaaaataaaaaacgccatgtttttcagtgccacagttgaaatggtaatggacaggcattcgtcactctcaacataaacaaacgcacacaaggctctaacgatgcacatgcttttaacaggagacgggggagggttgcagtgtcagcgcatagggctggtacagttgctttatcattaattaaggtgcaaaatagcatggaatccatgtcactgtttcaaatttttaaacatctttatcttttttgttttaccattatagatgtagtaaaatacttactgactttttaattggttaatttttgtccaaaaaaatatgaattttttctttcaattttttttaatattccttttatatagacaacaagtatcatgcattaatagattgtaagcattaattttcttttatgattctttttaagtatttaatgtaattatatgtttaagatttatattgaaaactttccattaagttgtagtaaccttacattaattcatatatgcatttggtgtaattcttttatatacatacaataacaatatattatttatctataaaaataaaaaataatatcataggatttgtaataatttgcatcttgtttagctaattgaataaattctttggtatataattaaaccgtttaaaaatgaacatttccttttttttattataagattgacttgaccgtagtaaaaaaaggagaaagagaaaaattataattcgattcctaactagtatttgctccaaaaataaattattgtataatttctcaattcaaaattggacgtttctctttctgaattccgaagggaactttgtgtctttgaaatttcaaagaaagaaaaattaggttgagcttttccttagagtcaattatattattgacctttatttttttgactttattattaagttttgaatttttaattccaaactcatactactttttgtaccatgatagacacgaaggttgcttaactttatgaccaatgcatatttaactataaaatggtattgtattatagttgtaaaaaatatctataaatgttttttagataatagagggaaaaaataactataaatgaacatggatttaaatcagaaataaaccagtatggtagtttcaatataaagtaaaatttacctaatttgtaacnctttgctccgttttagtttttatgttgttaatttatttattctaatatgttgttataatatcacttgttgaatatatgaaactataaagtgtacaaattaaattaaaaatgattgattcttttaagttttaattattttttacacataaatgtttcgtaataattagtctagtcttattatcacttaatagtgcaaaaaattgtagtctaacagtgtatcaaaatcaaattatctctatatataaactttttattcatatttattattatattactgtattttgaaataataataaaataacagtataattataaaataatataagctactccgttataatattaactgttattgttaactatataacccttagctaagtttttaggaaaatgttaattaatattatatttaataaactctaagtaattaacatcatatgaacagaaaaacacatataccaatgtattgtatagttacaagacttggtatatataataataaatagtcagaagaatttaaaagtaattgaattaaaagatgtcaaaatagaatcaatttatttaaaaaccatttgcttacaacattttctttatagagctttaagaatcaatgatttaaggttatctatggtacattcatgtgggtatatcttaattaaagctttaaaatgtatcagaaaaaggagaaggaaaaagtgggtgtggagtttggtaattgttctttgacaattcaaagcaaagcaaaagcgaagaggctagggtgctccaatccaacagggttaccttgttaatgatatctagtgtctgctgggaccacgtgcacctcttacccaaccttttaatgcatccctaccctttttggctctcaaatggtccaagagtctggctctatatatattctctagatagctacggtacaagaattctttatctttccaccagtttttaagagcaatgcgtatttgaagggctatcattctaatatatggcaccttcaataactcagggaactgtcaaaaaagcaacataagtttttcgtaccctgatttatattttttgtttttggctctacttaaggtgatcaagtaccatattaagtgtcttcggaatttcgttctagcatctcgaggtgcttcatttcaacccatcaagagagaaagccttttccgtttggatacattagaacgtaattgatgtttatttcaatacgaaaatatacttatttcttaattttgagctttagaaaaagtgcttcttcttttgacaagctttaaactacgatccaaatacaaggtaagtaaattcaattttaaaaatgttagtcgtgtaatctcctcctatcggatgggtctattttttgaaataaaatatccctctaattgtcatttcttgcccaagccctacgatcgaactcaagacatcgttaaaaaattcaaatattaaatcacttacgtcaacaattttgatgttgattattagtaaaaaattcaaatccataatctgtctttcttttctttctcccttcacccttcacaaagtaacaccattgctgcaacatgaccaacatcgagcctatggaaattgcaaagagcatcttctttgctcgtaaatcttctcaggctaaacatttttttccttttgcttctcactctcttctattttgtaacagacatttttgaattatattctccagatttgtgaatttgacttgctagtaaacctattatattttagcaataaatgttatagtttttttttctttatgtttttctttaaattaaagaattaataacgataacctttttttttttttgcttcacgacaatctggagatatactaaaactcaaacttcattaatttatgagtagagagagtgagagaacgagacagaaaagggaatcaacataacaaaccacgtgcttcatatgcaaataacattagagtgtattcgaaaaaagaaataaatgagtaatgagaaattgaaataaattatttcatagtgttttcgatttctatgaataaaaaaaataaatgaaaatttaacttagttaaaaaaaataattaaaagttcaaaattgttaactgaaaattgagtgtgattannnnnnnnnnnnnnnnnnnnnnnnnnnnnnnnnnnnnnnnnnnnnnnnnnnnnnnnnnnnnnnnnnnnnnnnnnnnnnnnnnnnnnnnnnnnnnnnnaaattataggtattaaatatttttttttgaaatagttgataaatataaaatgttagaaatagacatgattgtataattatttttttttataaattttaattacaatttatggataaaatatatatgtttgtataagtatagtttatccttttgatcaattttaaactcttatatttatatttatttaaagatctattattttaattattcttttagttttatttattatatatttttatattgtacgttttactaatattaatcttatacttatacttatactatatgtgaaannnnnnnnnnnnnnnnnnnnnnnnnnnnnnnnnnnnnnnnnnnnnnnnnnnnnnnnnnnnnnnnnnnnnnnnnnnnnnnnnnnnnnnnnnnnnnnnnnnnnnnnnnnnnnnnnnnnnnnnnnnnnnnnnnnnnnnnnnnnnnnnnnnnnnnnnnnnnnnaagtagacatcatatatattttttatgtttattaattagtataacaataagtatatttaaatatcattaagtattagtgttgtcatgtcatactaaatgattatcaatatcttgaagagcaaaactaaaataataaattagatatcgtaatggttaaaataaaaggtgtaatacagaaaaaaaatctgaaaataatagcgaaaataaaataaataaacctataatatattatttaagaataagttcaggataaaaaaatgaatacagaagctaaaatgctatttaaactaacaaattttaaaaaactttacaagctattataaaaacttatttgtcaaacatttttaatatttatagtcaaacaaataaactaaaataataattaaagtagcattcaaaaataagttagaagctgcaaacataaacttttaacatacttgttttaatcaaataaactcatcataaactagttaaactaatttataaatgactgaaatgacattattaaacatagcctaaaatttgaatttatgtgttcatatattaaattacacattgaactttaattactatttttttttggaaggttataccgaattcaaattcaattctttatgaaattatcttacgacaattatcatacagtttaagaatgtcgatacatcaagtttactgacgttactactacctcttaatagctttaatatgtatactttaattaactaaaaaacaaaatatatatacccatacacttgtgtggattactggacgattacaactttgcatgaataaatgaaagggaaaaaaaaaatgtctaggtgcttcgtgttatcatcatacaaacataaatggcccgcttgaaagagagtgattacagcaatgtctagtcatctactagctagctagctgcaacgatcacgaatccatacagtagtaatatgtcggatagctatatgttgatttctaatatgaggaacatatgtttatatatgtaagaaagcaacttcacaatttaagcaaacaaattaaagaaaacaagaaatccagtaattgttatgatcttgtaactaatccagatttagaagaataattatatatattaaatacattattaggtctaagtatcctctatgttatgatcctgtaatggatccggggtcgtgctcctaaaatagtgctatcgaggaaattagacttctgtgtccgaggtgacactttaggaaaaatgtgcttaagaggtaggaacccagaagggagaaacctcgcgtttattaagtaaccgatgtaggacccgaaagggggagacctcgcgtttattaagggaccgaggtaggaacccggaaaaggggacacctcacatttattaagtgactgaggtcagaacccggaagggggagaccttgcgtttattaagggaccgaggtaggaacccggaagggtgagacatcgcgtttattaagtggtcgaggtaggaacccggaagggtgagacctcgcatttattaaggctttagtaaggcgtcgaggcatgaactcggacgagggttgattttgagttagtaaggtaccgaggcatgaacccggacgagggttgatcttgagttagtaaggtgccgaggtacgaatccggacgaggggtgatcttgagttagtaaggtgccgaggtacgaatccggatgaggggtgaaccttagtttaataaggtgctgggatatgaacccggatgagggcagaccttaaactgaacttgcacaaggttgccccagctatgcatgccgagcttgacaagggagacttagtggcataatttgcacccgacagtgccagagtggcatcagaagcgtgtaacacacgcgccagagtcatttatatatatatatannnnnnnnnnnnnnnnnnnnnnnnnnnnnnnnnnnnnnnnnnnnnnnnnnnnnnnnnnnnnnnnnnnnnnnnnnnnnnnnnnnnnnnnnnnnnnnnnnnnnnnnnnnnnnnnnnnnnnnnnnnnnnnnnnnnnnnnnnnnnnnnnnnnnnnnnnnnnnnnnnnnnnnnnnnnnnnnnnnnnnnnnnnnnnnnnnnnnnnnnnnnnnnnnnnnnnnnnnnnnnnnnnnnnnnnnnnnnnnnnnnnnnnnnnnnnnnnnnnnnnnnnnnnnnnnnnnnnnnnnnnnnnnnnnnnnnnnnnngtcttccctacatctctgcatattttaaataaattaaaagaaaaggaaaaaaagatttaaaagttaaaaaataagactaataaaaaataactaacatcataaaagtagtgagtaactattaaaagagagtaataaaagtttaaaaattaaagaatgatataattatctaaattttgtgaacaccaacaaagaatatttaatttattaatagtatagattcacaaaacatgtttaaaacacgttacttattgtatggctggtagaaatgctgagtgtaataattgacattacattttctgtttttttttttttttannnnnnnnnngaaaataaaataaataaacctataatatattatttaagaataagttcaggataaaaaaatgaatacagaagctaaaatgctatttaaactaacaaattttaaaaaactttacaagctattataaaaacttatttgtcaaacatttttaatatttatagtcaaacaaataaactaaaataataattaaagtagcattcaaaaataagttagaagctgcaaacataaacttttaacatacttgttttaatcaaataaactcatcataaactagttaaactaatttataaatgactgaaatgactattaaacatagcctaaaatttgaatttttgtgttcatatattaaattacacattgaactttaattactatttttttttggaaggttataccgaattcaaactcaattctttatgaaattatcttacgacaattatcatacagtttaagaatgtcgatacatcaagtttactgacgttactactacctcttaatagctttactatgtatactttaattaactaaaaaacaaaatatatatacccatacacttgtgtggattactggacgattacaactttgcataaataaatgaaagggaaaaaaaatgtctaggtgcttcgtgttatcatcatacaaacataaatggcccgcttgaaagagagtgattacagcaatgtctagtcatctactagctagctagctgcaacgatcacgaatccatacactagtaatatgtcggataactatatgttgatttctaatatgaggaacatatgtttatatatgtaagaaaacaacttaacaatttaagcaaacaaattaaagaaaacaagaaatccagtaattgttatcatcttgtaactaatccagatttagaagaataattacatatattaaatacgttattaagtctaagtattctctatgttatgatcctgaaatggatccggggttgtgctcctaaaatagtgctaacgagaaaatcgaactactgtgtctcgggtgatactttaggaaaaaatgtgcttaaaaagtaggaacccagaaggggagatctcgtgtttattaaaggagcgaggtagaaacccagaaaggggaaacctcgcgtttattaagtgaccgatgtagaaatccggaagggagagacctcgtgtttattaaggaaccgaggtagaaactcataaggggaagacctcgcatttattaaggctttagtaaggcgccgaggcatgaacttggacaagggttgatcttgagttagtaaggtgcctaagcatgaacccggacgaggattgatcttgagttagtaaggtgtcgaggtacaaacccggatgaggggtgaaccttagtttaataaggtgttgggatatgaacccggatgagggcagaccttgaactgaacttgcacaaggttgcacggaccatgcataccaagctcgaccagggagacttagtggtataatttgcacccgatagtgctagagtggcatcagaagtttgtaacacatgcgccagagtcatttatatatatgatcattcctcaacgtttctttacagaaacaccatcgtcttcttcctttctttgtttccgccatttgttagagagagaaacttcataacctcttatcctcgaccaaaaccctttgcatgcaactggaaagttgaaaggaaccacccaatagttcggttccaacctctattctttctatagaccaccagatgaagagattgctttcttcaagagcccaccaaattctgtttcgaagggaaagaaggttttagggcgttcaagctttgagaagccgccccctagctttcctaaacgtttatagagagtgtgtgacggaggacattggtggttgtgacctagagggcgagagagagctagtgtaacattcggagcaggtaagctctctgttcttgggagtctttcccttgactgtgttccgccatactccgagagagtgttggttattgtatgtcatgatgcatgtggtattaaaatatgtgttctgcttttactaataacatgtatatgatgcatactatgattatatgttgtttgaatgatgagattctctgaccagtataatagactatgtatgaactttccttggagccagacgtagagcaaccccttgttgttaatggatacagaaacctgagagactgtgcccttaagtggatgatctttctcggcaatatatatacgtatgctataatggtgctgcattcctgatgttggtagcgcccaacggaatgacacctgtgttgcaacatatatgtgatgtattgtatgatatgcctatttgatgctatgtatcatggaaagtgaaccagggggaggagaggcctccaagaaccctgaatttactgagattgtatgtgatatgcgtctagaatataatgttttttcaagttaaaataatcatagaatcaatcataatttggcaataaaggtcttttaattatgaaaattctgatcattatatcatcaatcataatattactaatttatgaaaaatttatagcaggaaatcaagagaagaggtaaaagaaagaaagatcaagaagtcaatcttctctggattctcaagaggatagcacgagatatcgtctcagttgcaccagaaaataaagttaagacaatcttctatgtgatcttgcacaatcagcgctagaatccacgcgaattgcgtcagcgacatgggatttcaggatcttaaattatattgcacgaaattagaagatatgaggggtttttagagtctgactataaatatggactgagagagtagtagaaagggacagaggcctgtgcctctggacatctacatcgagaaatacagtagaacgcataggaggaagcttaaggaatgattgaaactaggtcaagaagattaaatcaagattgaaggagttttcttcttcttcttcttcttccttgagattcttgacccagttttatcttattttatgttattaaggttagacatgaatatttatggctaacttcctttattgtggttagagctaaaaccaatgtgaactcctctttaattggattgatattaatataaattgtgctaattgttttattttattttgttcttgaatgaattattccttattagacttgatcattctagtaaggttctaaggattagggtctacaataggaatgttggagctctaatttctgaaagcagtaaaataacaatttttacattacctaggaatagagatgtatgattacagagcaatagatctattagcttactacttaacttaagagaattgttaaggaattaagatttgtaattgggttaaagagttaaattattaaggaattaagatttaactaatttgtgtaaaaatacatcctctcagcaattagaataattaaaattagtaaccaattcaaataaaaaaggtaggaataaaaggtgaatatgctcttacattttattatttgtaacgatcgatatatttatcgaatgtataatatatttttaacttaaaattgaaaaaattggcgtattcaatcccaacaatgacgtcaaaaatatgatttatgaatgagatcaaattatacttctttcaatctgtgttcagaataagcatttttctcatatatatccattttcatgaatcgaatggtagaacagtagatgtacgagcactttcagcgaaaaatatgatttatgtctatttggatgcattatagcatgagttgttgcaatataagtggggtcaatctcaatacaaatctgactcttgcagtcatcattcaagtggacttttactatatgaaaattccatgttgtattttttaattagacatacttgataatatatatatatatatatatatatatatatatatatatnnnnnnnnatttttaaggtggaaaaaatctttgaactccgaaaatatttataaaatttatatttacctcatctttagaaaaaccaatgagagcttaaacttatgatctaccagtcagataatattaatcttataaacaaaattttatagctttagtacgtactaacatataggaattttgccaatattattcggatgctgtcggtcatcaatatacattcatgtactaaatatcataaaaaaaaatcatctggtgtcttattaaaccttttttttatggaaatattactaacattaataattaaataaaatataaaaataattataaacatttatcactttttatttataattactttcaatttctcctaactaattaagttttcattttgtaattatatttaaaatttataattataaagaaactttttgttatcattttctttatttaaagataaaaaattctgattcacaaacacgtgatagccatcaaaacactagcaacaatcgtagtatttgttctccatgtcccaacctctctctatataaagaaatctatatataattgtgtcgaaattcttcagaactttttctctagctactcaatgattgtatacacatgctattatagttaagaattaatatgtattcagctttcaattgcttttaattcaagtttatcccttggatcataacaattttttacttggtgcatataaaatttgtttttagagagtatcatttccttatgatagaggcccaactatgcataataaatagtcggagagtaagagcaggagggaaacttgtaaattaaacactccaagttataacaattaaaaaaaaacaattattattttcattttaaattacttcataactatgaataaattgttcatctgagtgaaactgagtttaattttcttaagtaagatttcagattcagacattatgaaagaaaaaaatgtgattagataaaaatactctactaaagacgttcaatcaaattttcaatgaagattaaagattaatgcttagcttcaatccaattttcaaagggctcactataaattattatttataaaaaaaaactaggctaatattcatcaaaaggatgttcgatttagtgtaatgaaatgaattgagaatttttttatgttgtaaccatgctagcaatcctttttctcagtgacaatcgaagtagttgtccaagtaatattttagtccttttgaaagattgtaactcacgttggtacaattgcatatagagttgggtatacgagttgtgtgatttatggaggataattttaacttgtgattctcccgaagatatgtggcccattaattgtaagtttttttcaactcaatatgtataacctatgaatttagcatgctaaaattggtctgtggggttcttttttctttttaatatgaatcacgtttgttatgctttttgctaactattatgtgtatatttgacatttgttcttaagagttaagatatttagttcacaagactttttgtaccaagtatgtatttgttatttggtatttggttggaacttttgttgttacccattttgcacttcatcagtatatttgttatattattaaagttagtcaattattaacaagtaaaagtaataactcaaaagaaaaatataaaaaaaagtgcataagtgaaccagattcacccgtatacttagctctgaaaatttcctgaatttgcttgaattattagtatttttcattgtttctctgttaaagaagggcataagtagtgatccattagtggccatatagttccagtgtctacgcttttctatgaatcccagctagtcctttaagtcactatacccaagggttttgtcctataaattttgatgcatttgcactctcaatttcgttggatgccatttggtatatatagatttttttgacttctacgtttaggacaagattcttttataaatggggtaatgacacgggcctaagaagttaaaaggagaggagaagaaaaaaggcgtatgatcatttcaatttagccattgacacatgttttttttttttttngctagtcctttaagtccctatacccaagggttttgtcctataaattttgatgcatttgcactctcaatttcgttgaatgccatttggtatatatagatttttttgacttctacgtttaggacaagattcttttgtaaatggggtaatgacacgggcctaagaagttaaaaggagaggagaagaaaacaggcgtatgatcatttcaatttagccattgacacatttttttttttttttgaggaaattacatttgacacattgttgctgtgaatattttgcaaatatatgtttagctatcgaagtggcataattgagttcttttgtgattttgagcatttgtttgattattgataatgaggaatgaagtgcatcaaagattttcctaacatctttcctctttcttcctttctcttctgacttctcttatcttccttcctgtttcttcgtcattttctactaatgatacattttattgttaacttaaaactaactctaataaaagtatgaaggaaaaaattacaaaaaactaaacgaagaacaaataataaaagtatattataccatactaggggaaagaggtcttccctacatctctgcatattttaaataaattaaaagaaaaggaaaaaaagatttaaaggttaaannnnnnnnnntgtttttttttttttttacatcttcctgttgtctatcagaacaactaatttgttatgaagattttaatgggttgataatggcattcttcttaccggaacatgcacggttgtatttgcactttttttttggtggctggttgtatttgcacttcttaatcatgtaatgaagttgcatattttgaacttaatttcaagaacattgataaattataataattttgtgctaattgatttacacgcacggtagatataacaagttattttgaggacaaaataagttaattcaaccttgtaaaggggttttttttaggatgatgcctgtgtgtgtcatcaatgtgtgcatttgtttatttgccgactggattgtgggaataatactggaccatatgtcttggcccatttccattttcagcaataggtatccactatccaggatcttcccggaaactaaatgtgttcaattaaatttgttagcttcagatcttgaataaacatgaacaaacatccccagaaatatatattaaaaaaataacccaaaaataagatcttgtaaaatctgagtatatcgttttggtaaaaaggaaaaaaaaatgttaaataagatattcaaactacaaaaaagtaaaaccaatggtcagtttatttaaatttatttttaaaaaatacttttttaataaaatgagtaatttttcagttttctaatatacttgccaaaactgtttttacttacaataagtaatttttttaagaaataaatcttgggtggatttgtttaaacttcaaaaaataactttaaaataaacactttttatataaattttttaataaataaaatattacttattttaagtaaaaatagtttagataatcacatcaaaaaatcatagaactgcttattttatttaaaaaaccaaaaatgaacttaaacaaactaacccaatctgtttttaaaataacgctttcaattttgttacctttttttttaaaaaaaaaaacatttttcaaatatttgataaaaatatcaataatcaagaagattaactaagagggttttgttaaccatttttctttaatcagatggtcactcttcagagtacatgcacaattggtccactttgcagttgcatttaacctccactactatgactgaggcacaacacagaaagatggtgatgaaagtttggatattaagatttattgttcatctcacccagtcaatgatttgttaataacaatttcacgaagtcataattcttttgcatataatctttgtgtttgatgaattgcctcaattgattggattagatcacagattaattactttaactcgtttcttggttctgatttcatatgcaattactgcagtgttaatattggttggagttacatagtatcgctgacaataatactaaataaaaacacaataaatgaagaaagaaattgagaaactaagcacaataaactcagtaataacagctgtagagactagagaaaatcttacaagcctcatttcatattttcattcattctcctgtcataactatggacaataacacggttcaagcactgttgctgcttccatcagttgatccaggcataagctctctcagcatggccactacctgcaacatgtttggccttcttgaaggcaagtcatcaacacactgcaaagtaatctctaaatatcttatcatctccttcacttctttggcttctgcttcatcagttccttgagtggccaaaagcaagtcattgtcaattacttccatttgcttcccttcgcagacctttatcttcgcccaccccaccaagttggtgtcaccaaagtcctctttatcagtcgggcgtttcccgctaagcagttccaacatcacaactccaaatgaatagacatctcccttggcagtgcacctgaaactttggtagtactctgggggaacatatccaggtgttcctgctagtgtgctcacactaagatgtgtgtcaagggcacttattagtcttgccatgccaaaatctgagaccctggactccatttcattgtcaagtagcacattgcttgatttcatgtctctgtgtatgatgtgagggatgcaattgtggtgcaggaaacaaagtcctttagcagcacctcttgcaatcttcttcctttcttcccatgtcaaaatgcgtcgatcacgcgtcttgattctcccatgaagcatctcttctaggcttccatactccatgtactcatacacaaggagcctctcttcccccactttgcagtaccccaacaaagggacaagatttttgtgcttgatcttccctaaggtttccatctctgccatgaattctcgatcgccctggcagctcagtcgaatgagcttctttatggcgacactggagccgtctttgagtgtggccttgaacacttcaccaaaaccaccacacccaatgaggctcgctgctgagaatccattagttgcttcaatcaattgtgagaacttgagcttcctcagctgcctctgaaatgttgcgacattaatgcttaggggctctttctctttgtcaattttccatgttgtagcagcatggcatgcttgtaagctattgagcatcttgacttcctcggcctccttcctccttgcgcgcattgcaattgcccacacaattaagatacacacagaagcaacagagatgagaattcccatgacaatgctatttgcccatgttgcagttgctgatttacggtctcctttgctaacatcatcacttggatatgttgtgggttggctgttgtcattcttgcaatcaggcaatggtacaccacaaagtcctggattgttcgcatactgggaagctggaagtgtactcagttgtcccctagatggaatctgccctgttaactcattgttagatagatcaatttgtactaagaatgagaggtttgaaaatgagtctgggatatgaccctgcagtctattgtgtgatgcatcaaacacacccaaatttttgagctggccaagtgatgaagggatttctccggatagctgattgtgagataattcaagaacctgtaaagccaccatatctccaaattcatctgggatttttccgcgaagctcattataggaaagatcaagatactccagtgtctggtacttggtgaacaggcttaggacaggaccagaatagagtcttgtgaagtcacaagtcctcaatgttgggacctgcaagagtctttcaggtcggataccagagaattctagcaaacctccaacccctttacatgagtttccaacatttcttacaaacaccaaagtgtttcctgaaaggatcccaaacaaggattttgctcctagctgcctgccaagtcttggagggatctctccagtgagcttgttgctgttcaagtccaaccacaccaaactgctgcaatttgctagctctgatgatatatccccagtcaagctgttgtttccaagctgcaggactgctaaccttgtcaagaggccaaacttgcggggtatttcaccactgagttcattgcttgtcagtgatatccattcaagattgctgcaattgaacaactctattggaattccacctgtgaggtgattattgttcagtatgagatccttgagattcttgcactggcccaactttggtggaatgcttccttccaagccattgaaccatgctattagctgctcaagattttcgagttctccaagctcatcagggattgtaccattgagatagttcagactaaaatcaagtgtcttcagctgtgagcactttgacagttcagcnnnnnnnnnngatcatatcttaaaccggattatctttaaaggaatggaaaaaaaaaaaaaaacaattcacagtcaaaagcatcgaaaacaaagacaaattataaagcccttgtttggatcagtacaaattttggtaaccgacaattgaggattctaaggaggagaaagggatatttacgaacttaacatctaacgttctcgtttcaatatgtttccgcttgttgaattttacctgaatttcactagtttgaaaataaagatctattaatcagattttttttttttttgaaagtcagatactatttatttnnnnnnnnnnttctagcaaacctccaacccctttacatgagtttccaacatttcttacaaacaccaaagtgtttcctgaaaggatcccaaacaaggattttgctcctagctgcctgccaagtcttggagggatctctccagtgagcttgttgctgttcaagtccaaccacaccaaactgctgcaatttgctagctctgatgatatatccccagtcaagctgttgtttccaagctgcaggactgctaaccttgtcaagaggccaaacttgcggggtatttcaccactgagttcattgcttgtcagtgatatccattcaagattgctgcaattgaacaactctattggaattccacctgtgaggtgattattgttcagtatgagatccttgagattcttgcactggcccaactttggtggaatgcttccttccaagccattgaaccatgctattagctgctcaagattttcgagttctccaagctcatcagggattgtaccattgagatagttcagactaaaatcaagtgtcttcagctgtgagcactttgacagttcagctgggatttctcctgtaatgagattgtctggcattctcagctgctcaagtgaggctgctcctggacataaatctctggggatagatccataaattttatttgagctgaaatccacaatcttcaactttttgcaggaagatagtgaagatggaaattgacctgtgatagcattatttcccagcctcagttcctgtaatgatccaaggttctgaaagattgcatctgctaactgccctgacatattgttgttagatatgtcaagaagttgcagccaactgcaagaagagaaactagatgggattgagcctgagatgttgttgaaagaaagtttgagctccaaaagggtagcgcatgcatttccaaattcagaagggatccagccagtgagttggttgtgcgaaagatccaaagtctgaagtttgtttagctgaccaaaagctttggggatatccccagaaaccatattgttggctaaattcaaatatttaaggctggtgcagtttgacaaagagagtggaattgagtctgataaacggtttccagatagatcaagttgcaacaaggaaatgcactccattttcaggccaaaaattggccctgacaggttgttggaagagaggtcaaggacctgcagtttatcagaattttgaaagaaattttcaggaatagggcctgtcaagttgttgtaagaaagattcacaacaagaagatttggacacttggagaacaggttctcagggacaggacctgtgactccaccaaaggatagatcaagctgtgtcaaactatatgggagattaagtaaagaggtagaatttacagaaaatgaattcaaagacaatttcagaacagataacatatctaaagaagacaaagggtcaagagatatagtcccagcaaggtcattattcccactaatatcaagctgagtaactcttccaagggtgcaagagactccataccagctgcatggattcctattcagcttccaccctgacaaaactccacttggatccttctgaaccatccttttgaacatgagaagagcctgtgcatcagtcttgatggaggaaactgctgcaccctcagtcacaggaaacaaaacagtgatcacaagaagtgtcacggtgagaagaggcaaaaactgaacatggttgttctccattgagaaaacaagccttgtgcaaagccagaacagaacacaggtctgggaagagagagaccagcaaagatgttgcagagagatatagattaatgtgtgtagagaggagagaggaaagacatactgagagtggtgagtatgatgagaatttgttgtggctaaacctttgggaaaaggtgctgctttttgtgttttataaaatttaaaggagggaacgtgagagggaataaggttgtgctgtgtgtggtgggtatgtactcgtaagtttgtagtataattgctctagtgcaaaaattttactttttttggatgatctttgtcaaagaaaatctacctaatcatcttagtaaaatcatttcttttaattcatattttttttatccatataacttaaatttgagacattatctaaaaggttcaaatttaatttcttttttatttataatgtagtatataaagtttttagttttattgatgatattttttgtcaaaataaatctatttaattattttaataaaatctcattttttattcaattttcttgtattcacaaaatataagtttgaaacattatttaaaagatataaactcaatttttatttatttattatgctgcagcgcaaaatttctaatttattgatggctaagttttattaaaaatctatataaccatcttaataaaatctcatctgttaatcatatttttttttctatcaaacaaatttcaatttaaaacactatttaaaacatgcaaactcagtttttcactcctaaaaacatatgatagtattaatatcttggtaaaataatctgtgtagagtagagaactgagagaatttagttaaagaattgatttgacttttggtcaacgatttgggacccacagacaaaggtctgcatctaaagatcggcgctataaaaaaaagaaaacctgagagcttggcctgtgcctgatccaagagtcactgtctgtcagagtgcgtgagaatgtttcccccatttacatagtactagtgtcgtgaaacataatattggcaccatgtgcaacatatctggttgttttctgatttcagccattgtttgtttctcccagtgcttactgatttggtaaataaagtattatattttaaagtttatttagacttctgtctcttttaattatattatgtgtaattttggctttcaagtttttttaacaaattaaatattttattttaaaattaagtttatttatttattttttgttaattttatgtaaaattattaaattataatttttactagaagttatagaaaattaaattaattaaattattttaaaccatttttcatttaaaacccatcaaccaaaacattaaattcaacagaaaagcctcaaattctacattctttaaactctaatcttgcataccaaaattttcaaatttcaattaaatttctaacttacaccttattttatattaattccaaattcatttataaacccccacatatttacacagaaaataagattttgagagttttaaatagaaaaaaaaatatggaatgaacaatttgcttgattttaaaaataaataaatttaattggtcaaagaaaaatttcgagaccaacattatacataatttaaattaaaaggatagaaaatacacttaaactatctttaatctttgataaacatagcaagattgataaataagcaaacaaaaaataaacataaactaacaggttctcactagtataatttttattgttattgatgttgatactgtctgtgttaatctctaccagtttccagttgcatttaaattttaaattatactctgtggactgtatttgtaattgaagtctatggatgagcttatcatcaacgtgattgtttaatttagaatatagtcttgaaaagaatgaaaaatgtattagtgagggccccacgtgttgaaatgtgaaggggaaaaaatgatgatagtgtgttatggttgaatgtttcctgtgaaaaaataaattctaggtagagtaaacaaatggagggccccccaccaatgaagcaacatcaattagctccgtgttaatggcatgggaggtgatgatgctcccttttgcgcctttctcattcattcttgctttgcaagcagttgcatatatatatatatatatatatatatatatatatatatatcactacattatttacaaatttgaacagtgactcggttcaattcaccctaatctttataaagttttaactttttatatagctgggttttgggaccatctcttactttgctacacactctaattagcacattctgcttagtgaatccctgttgatggttcttcacaccaaatcaagattgtgtctgcaagtggtgatttttttttccataggagagaaaattgaattcccattttatttaatgtttcttttatgagtcacttggagaagaatgcaaactagtatgtgagagaaaagacatttaattatgaaataattttacgatattattaaaagatttgacatgagttcgaatcccaaaatagattctttgcatacttaagaataagactgcctagaatactttttttccaagtattagaagatacttaatttttttttttaagatttgaaccaagttgatatttattgcttagatgaaatggattcctaaaaaataatacatttgcgatgtacaagaaggaaataaattccccctctatatataatataatctgtagtttgtagtagaataatgtttagcgatttaactaagtcctgaattgagtttatgaaaataagtcaggtagccgtaggaaacatgagtcaattggaagatcgaataatgaaaaaaatcgtgcacgcgcatttccgcaaattttgtatcctattcaactaaatatctttgccatatgaagtaaattcacagtcaaaatcaaagagaattgggtctaacagaaaatgttactctcacaaagtggcaaataaggttcgaatttttgttgaaaaagatatatatctatattaaacatctgatcatatcttaaaccggattatctttaaaggaatggaaaaaaaaaaaaaaacaattcacannnnnnnnnnnnnnnnnnnnnnnnnnnnnnnnnnnnnnnnnnnnnnnnnnnnnnnnnnnnnnnnnnnnnnnnnnnnnnnnnnnnnnnnnnnnnnnnnnnnnnnnnnnnnnnnnnnnnnnnnnnnnnnnnnnnnnnnnnnnnnnnnnnnnnnnnnnnnnnnnnnnnnnnnnnnnnnnnnnnnnnnnnnnnnnnnnnnnnnnnnnnnnnnnnnnnnnnnnnnnnnnnnnnnnnnnnnnnnnnnnnnnnnnnnnnnnnnnnnnnnnnnnnnnnnnnnnnnnnnnnnnnnnnnnnnnnnnnnnnnnnnnnnnnnnnnnnnnnnnnnnnnnnnnnnnnnnnnnnnnnnnnnnnnnnnnnnnnnnnnnnnnnnnnnnnnnnnnnnnnnnnnnnnnnnnnnnnnnnnnnnnnnnnnnnnnnnnnnnnnnnnnnnnnntaagtatgtaaattgatttttttaaagataatacatattatttatcgaaaacaatcttattcaaatcgaatagaattattatgagtaacagaattatctctaaatatttaacataactatatatttaaaacataaacttgagatcactaattaacttgaaataactttgcatcaattgatatttgtgcttaattataagtataattggtttagtttcagctaaaagaatataaggattacttagatataagcttatacattttggtccacttaagtgtgtgtaaagtttattttctaacctgtaaaccaattagtaattcacgtacttatccttgttcttcttttaaggaaaatgtttttatctttttcttttagtcattatgttattattacaaaatatttattgagtttgttaataattaatctctataaaaaatctgacggactatctttaataagatttagttcccaaccatatttttttatcaacatgcttgaatatgagatcttatttaaaaagattaagtttaattccattagcttgaatcaaccacttggttatttttgttcttttttttttttaattatgatagtcaatatctaactttttgtcaaaaaaagaagagagaaagaaaataaaataaaaaaacctttgtcaaaaagagggacctaagtttccgctttcctcaaattagctgaaatgggaaggccaaacacttgcaataaattgagaaaattagcaattccatcaaaagataatcgatacatcaaaggtccgataccaacttgaagcatctaattatagtcttcaaggacaacttgaagcatgtcacattcacagattgcacatgagatacttctatgttttcaattaatttaatatctcttgaatttaagaataatgcttccttaataagaccactgattttgaagctattagttaagagaaaagagggctaataggatctctgtctaattctccgagactttaaattggaggtagctaggattaccaaaactaaaattgataaaataataataataaaaaaaaactaaaatcaaccttccatgagttccattcaacttctctacttttttattgaaccaaggcgattcatcattcatataataaaaaaagctctaaaatataattcctagatttgaatacttgaaagtaacattgatataaattaaagcctaggtgttcctgctcaggtagcgtgtttcgaattctcatggttttggtctcattggagagctatccgcagtagtggtgtatctgaaaatactctgataagcatgaatgagtctttatgctagagattgaaacaacataattgcctcaattttgttcaggtttcttttatatagagacccaggaaagaaaacgttaactgtccaaggatatatatatatatatatatatatatatatatatatatatatatatnnnnnnnnnnnagaatgtgaatttaatcttaatttaactctacaaaatcagtgtaggaattctaattttttcaatacattttttcgcatccaacacttttaaatttgatgtgtagataatagaagagtgatccgtttaatagatttaatataaattttaatattattttaaaacatgagtctaactcaattttataaaattgatttttaaagtaagagatgttttcacctatatactttatcttgatattatctttagttgatgtgaaatttaatcttttttttccaatagatatattggctcaggttgtctgcagttccagttcatcctctgatttgttagtttgaacctccataaactaaatttagactaattgtactttaaaagcttcatgctctttggctaaggttgttggatttgttcaggttgtgagttgtgtgcggtgccacatgcttctcccagtaagtctttgttggaactattagttaatttagaattggaatatatccaattgcacaagggtcagaatctgagtagtcaagaggaacaatataatctactataactgtacaaaaaccaatttaaatagaacctgtatgataagtatgaatcagaaacagatgcaaagagatgaaaggatccgagcctaacaatgttgtctccttaagacaatttgttccctccaattgatgccaaaggttgatgaacaattgtctcccaggatagaacggatcaacgtctgaagattgatggcacttcaaatcaacaacccaaacgaacaaagacaatgcttgaggaaccacagagttatgtgatatgaaatgcactagtgtctaagcgagactatcagaaaagattaactatcaaaactttatcagttttccactttcttgcttcattccttcctattttctgactgtctctgtgtctatttatagacaacaaacaactctggtgaagagttgtcagtaaaccatcgcgactcttggcgatgaaccatcgtgactcttggcgataaaccatcgtaatcgttggttatcggagcggttgagagtagttatttttctaacctttcccaagagcggttataagtagttactattttgaattgttaaccgcctcttattcataactcatagagtttaaacaaaaactccaacaatcccccacatgaataagagatcaattcaacatgactaaatgcatatgaatatgtatgcaagtgtggttcctcggcgagaaacaattgcatcgagataggtaggggttacctttgaaccttctctagtgtaaacctatcgggtatactaggccaatcggtggtcgtgatgccttgaaccgtcaacctgtatggtgtataccgagaaaataggagtcacacaattgcttctctagcattgctcgtcctcattgttgtgtccattttggccnnnnnnnnnnnnnnnnnnnnnnnnnnnnnnnnnnnnnnnnnnnnnnnnnnnnnnnnnnnnnnnnnnnnnnnnnnnnnnnnnnnnnnnnnnnnnnnnnnnnnnnnnnnnnnnnnnnnnnnnnnnnnnnnnnnnnnnnnnnnnnnnnnnnnnnnnnnnnnnnnnnnnnnnnnnnnnnnnnnnnnnnnnnnnnnnnnnnnnnnnnnnnnnnnnnnnnnnnnnnnnnnnnnnnnnnnnnnnnnnnnnnnnnnnnnnnnnnnnnnnnnnnnnnnnnnnnnnnnnnnnnnnnnnnnnnnnnnnnnnnnnnnnnnnnnnnnnnnnnnnnnnnnnnnnnnnnnnnnnnnnnnnnnnnnnnnnnnnnnnnnnnnnnnnnnnnnnnnnnnnnnnnnnnnnnnnnnnnnnnnnnnnnnnnnnnnnnnnnnnnnnnnnnnnnnnnnnnnnnnnnnnnnnnnnnnnnnnnnnnnnnnnnnnnnnnnnnnnnnnnnnnnnnnnnnnnnnnnnnnnnnnnnnnnnnnnnnnnnnnnnnnnnnnnnnnnnnnnnnnnnnnnnnnnnnnnnnnnnnnnnnnnnnnnnnnnnnnnnnnnnnnnnnnnnnnnnnnnnnnnnnnnnnnnnnnnnnnnnnnnnnnnnnnnnnnnnnnnnnnnnnnnnnnnnnnnnnnnnnnnnnnnnnnnnnnnnnnnnnnnnnnnnnnnnnnnnnnnnnnnnnnnnnnnnnnnnnnnnnnnnnnnnnnnnnnnnnnnnnnnnnnnnnnnnnnnnnnnnnnnnnnnnnnnnnnnnnnnnnnnnnnnnnnnnnnnnnnnnnnnnnnnnnnnnnnnnnnnnnnnnnnnnnnnnnnnnnnnnnnnnnnnnnnnnnnnnnnnnnnnnnnnnnnnnnnnnnnnnnnnnnnnnnnnnnnnnnnnnnnnnnnnnnnnnnnnnnnnnnnnnnnnnnnnnnnnnnnnnnnnnnnnnnnnnnnnnnnnnnnnnnnnnnnnnnnnnnnnnnnnnnnnnnnnnnnnnnnnnnnnnnnnnnnnnnnnnnnnnnnnnnnnnnnnnnnnnnnnnnnnnnnnnnnnnnnnnnnnnnnnnnnnnnnnnnnnnnnnnnnnnnnnnnnnnnnnnnnnnnnnnnnnnnnnnnnnnnnnnnnnnnnnnnnnnnnnnnnnnnnnnnnnnnnnnnnnnnnnnnnnnnnnnnnnnnnnnnnnnnnnnnnnnnnnnnnnnnnnnnnnnnnnnnnnnnnnnnnnnnnnnnnnnnnnnnnntggttctgcaagtgttgtagagaatcggccttttttaagttctcattgaagcggccctcacttcacactcacataggtgatttcttgtgatatacctccacatatatcatctgaacacatcagattaagaaaccattaaaagccattatgcttaccctcatatgcactgtattgtcataggaatgagtatgagtttaaaaactccacagtgtttaacagtcgatcatgacttagttgtctttttgaacctagttcgtgggatctccactcatcaaggtagagttaccgcgatgatcaacaattgataggccttagacccattcctttcgacaaattttcaactaactctgtaggaattcctttagttaatgaatccgctatgttctctttagacctcacatagtctattgagatgattccattcgagagtagttgtctaacggtatcatgtctacgacgtatatgtctagactttccgttatacatgatgttcttagccctaccaatggcggcttggctatcacaatgtatgcctacagctggtactggttttggccaattgggaacatcttcaacaaaattacgaagccattctgcttcctcaccggctttatctaaagcgataaattctgcttccatagttgatcttgcaatgcaagtctgcttggacgatttccaagatacagcacccccaccaagggtgaacacatatccgcttgtagatttagtatcattagaaccggtgatccaatttgcatcacaatatccttcaataactgcaggatactgttcataatgcaaaccaaagttttgagtgtgctttaggtatcctaaaactcttatcannnnnnnnnnnnnnnnnnnnnnnnnnnnnnnnnnnnnnnnnnnnnnnnnnnnnnnnnnnnnnnnnnnnnnnnnnnnnnnnnnnnnnnnnnnnnnnnnnnnnnnnnnnnnnnnnnnnnnnnnnnnnnnnnnnnnnnnnnnnnnnnnnnnnnnnnnnnnnnnnnnnnnnnnnnnnnnnnnnnnnnnnnnnnnnnnnnnnnnnnnnnnnnnnnnnnnnnnnnnnnnnnnnnnnnnnnnnnnnnnnnnnnnnnnnnnnnnnnnnnnnnnnnnnnnnnnnnnnnnnnnnnnnnnnnnnnnnnnnnnnnnnnnnnnnnnnnnnnnnnnnnnnnnnnnnnnnnnnnnnnnnnnnnnnnnnnnnnnnnnnnnnnnnnnnnnnnnnnnnnnnnnnnnnnnnnnnnnnnnnnnnnnnnnnnnnnnnnnnnnnnnnnnnnnnnnnnnnnnnnnnnnnnnnnnnnnnnnnnnnnnnnnnnnnnnnnnnnnnnnnnnnnnnnnnnnnnnnnnnnnnnnnnnnnnnnnnnnnnnnnnnnnnnnnnnnnnnnnnnnnnnnnnnnnnnnnnnnnnnnnnnnnnnnnnnnnnnnnnnnnnnnnnnnnnnnnnnnnnnnnnnnnnnnnnnnnnnnnnnnnnnnnnnnnnnnnnnnnnnnnnnnnnnaataatcgtattaacatgtatatctgagacatcggatttataaaccaagaatcgactagcactactattaagtgcataaccaatgaatacacaatccacggttttaggtccgatcttcaaccttttgggtttaggaaccgtgaccttagccaagcacccccacactttcaagtatttcaaggaaggttgctttcctttccatacttcgtatggtatgctctttgtcttcttgtgaggaactctattaataatatagtttgccgtcaaaatggcttccccccacaagttctgtggtaaaccggacgtgattaacatagcgttcatcatttcttttaatgtccgatttttcctttctgcaatcccatttgattgcggtgcataaggagcagtcatctgatgtataactccagattctatacagaattcctcgaaggggccatcatattctcccccacgatcgctccttatcgccttaattttcttgttaagttgattttcaacttcatttttatattgtctaaaagccacaagtgcttcatccttactattaagtaaatagacataacaatatctactgcaatcatcaagaaaagtaatacaatatttcttattacccctagatggtacagttttcatatcacatatatcagtatgtattaaatctaacaattcagttgatctatcaacagaagaaaaaggtaattttgaaaagtacagaaacactgattaatcacacagatcaaacagaaacactgattaatcacacagatcaaacagaaacactgattaatcacacagatcaaatagaaacactgattaatcacacagattaatcgttcaaagtacagagagtagacaacagtatataatacaataagatagaatatactgaactcagattcaaagcaaattgtcttaagattgttggaactattagttaatttagaattggaatatatccaattgcacaagggtcagaatctgaatagtcaagaggaacaatataatctactataactgtacaaaaaccaatttaaatagaacctgtatgataagtatgaatcagaaacagagatgcaaagagatgaaaggatccgagtccaacaatgttgtctccttaagacaatttgttccctccaattgatgccaaaggttgatgaacaattgtctcccaggatagaacggatcaacgtctgaagattgatggcacttcaaatcaacagcccaaacgaacaaagacaatgcttgaggaaccacagagttatgtgatatgaaatgcactagtgtctaagcgagactatcagaaaagattaactatcaaaactctatcagttttccacttttttgcttcattccttcctattttctgactgtctttgtgtctatttatagacaacaaacaaccctggtgaagagttgtcagtaaaccatcgcgactcttggcgatgaaccatcgtgactcttgacgataaaccatcgtaaccgttggttatcggagcggttgggagtagttatttttctaacctttcccaagagcggttataagtagttactattttgaattgttaaccgcctcttattcataactcatagagtttaaacaaaaactccaacagtcttgtatagtccaccaatagacatcaaattcacgttgatttttaaataattaatctttgagtcatttatataagtcttgtaaataaaataaaccgtgggttacttagtataaccgagcaaaagattctaaatgctgtaattgtttactttgtatgtaattaattaagatttaatattgcacattaatatgattcttcgtcaagaatttcagcatgtacatgagagcattgttctctatgtgtattttatctacactcttcttaatatacaaaccctaactcgagatctctagctaccctcctagatacacccaaatcatgattctagtacaggagaattgaagtatttttttagaaatggattcatggtttatattgacttgcatatagttaaaagtttatgcattgtttgaatgatcaataatggaattaatattgatatatcactttggctggctttaggaaacgagatattgaatgacttcacaagtattaaacagttttctacaacaaaaatgaatattgtgaagtaacaatgtaacattcacataacacaaatatctggtcattacgactagggaagagagagagagaagcttactttcgtattttgtgatagtatatcgatattgaaggattgcattttgaccaagagaagttgatgttacgggaaaactgcgtgataattatacttactattattagttttcaatatggtgacccattcgtaattatttcgaaggaccatactaagggatgacttttgtatgtagaaagtgaattattttcggggcacttccataaacttgaatgtaaaagcctgaaataccttgacgcttcgcaggtccttcaacagttccacgaacaaaatttctcattgctccacgagggtaataatgacatggacattcaatatgttttactttctttttttttttttttcattttttggtataacattaaataaaaaaaacttatatattgagttcatgagtttaataattcttttaagattgaagagagcaattaataaaaataaacactacctattattattaacaacatctttaagtattttgcaggctttcgtaattacaagaaactaccagtgtattttttttttttatatataattgataacctccatgtcatttttgaagtatagctaggaagagaatgagaaaaggtaatagatgtgataaataatatgatgagaaataaagaaagatgaaaagaaaaatgaggtggaattgagatgaggcacttctttagtaattttaaaagtatactaacccattttcagttccaaaaccgttttggctcaaaagagggacctaagtttccgctttcctcaaattaactcatatgggaaggccaaacacttaacttgcaattgagaaaattagcaattccatcaaaagataatcaacacattaatattgattaatcaacacatcaaaggtccgatacctacttgaagcatctaatatagtaattttaaaagtatactaacccattttggttacaaaaccgttttggctttgactaaaacactaaaactataatttttttataatataatttaagaatattattatttccctattttatgaaataccacaaaaatagataaaaaaaaataagtcaagtcttatcttaattatattggtgagaggaaatgttaatgatagtttgaaaaaaaaaactaacaagatatgggaatgtgggatgaaattttttctatgctcgaaggctctaaccaatgtgttcgaaggcttcaaacactatcatcgtttcagttaaaaatcctcattttcttagtgataagcgataaatttattgtatttttatatgtaatttgaaatatttacttgatattttagtatattttaagctttgttttgaatcaaattcgttatatttttaatttttaatatattttagataggattacgattttagaaggttttaatatgattttgagttttacataaaaacaggaaaattttataaggtataggcaatttaagttagaagagtatgtctcgcttaagtgaacaaatcacttaagtaaaaagtgtgttaggcagtgtctctataaactgaattaattcaaaactgagataattatggagatatagctcaaaaataaatgaagaaagtcacttggaagataattggaataattaaaacatattatatcagtttaagagataatttccttatatagattatattttgtaaattaagataatttgtctctattaaatatacatttgattctataaatagagagacataggcaacaacaaaaaacctctacacaccacctttcactaaaaaatcctcttatcttctctcttcttgtatttcatgagtaactagtttcttttttaattaggaaaggaaaaagattgaaccttatttgatttaattttctcacattaatatattgtttgagtttattattcaccttctatatgcacatctcatagatgattctagaaattgacatgcactctgacaagcctcgttgaaatccgaactaaatcagaaacttaattggggttatctctattaatagaataattttggttaagtctcactaattctcaaatgataattttgattgcttgtgttagtttgccaagggattgagaatcaagacaagtgattagggataaaatacatcactaatttggggatgaacgatataacgacatagaagtgtgagtaattgtagcaaataggatgattttgagtacaatcttaacatctcaacgttattgttccttctacaattattatcgcttcaacaaataacttattaacttttcttttagtttatgttgttgaatattcagcatattaatctctgtagaaaaatatatcattttattttctgttttgattagttttagttttaggcagtttaaaatatagaaaacaaaaaaatatctttattcgaaaggctttaatttgaatattcatcctgtactattcctttggaggatgatgacctgagcttcatttgagtattataattaggatttgggttacacttgaccgatgtaaatcctaacgtaatcaaaacgttaacacatagataataacaaaggtacaaagaaccttctcttttctagttagatgggctcacatgaagaaaatttggttgcttcttttttgttttcatttaatcatctaatatgaacaccaactatttgctctaaattaacttctttcttttaatttgttccatatgtttcttttattataaatttttcacatgaattatattcactcatcaattttaaagcttctattcaaagcaattacgaaaattttatcaaaaacgaatgaatatttctcaaagtgagagatttataatataataaatgtagaacaaaagagagaaggaaatcgagttaacttgaaggaagcaactggtgttcctattttttaaaatgaaaataaaagaagtaactaacaaatttgtcatgacttgcaccgtaattgttgtcattttaattttcaggctttgttgtagtttgtaacattattcattgtcgatttctcgataatttacacattaccacactttactcaattcttctttggaaaccaatactagaatttttggtgtgctttatcttcactaatatgctttagaaaacttttcagaaagtcatttatctcactcacctcatctcctttcttgcctaatagatcaattaagctgttttgttgtttattgatcaatcacgttttactatttttgtaagaaaaagtcgattcccatctgatctaacttctatttggttcttcatattggtatgacacagatgcaggtggtatgagctgcgctactaggtttgtcagggtaaaggttgggcttttgggtactactctattgcagtagcatttcctacgctttaatccagttgacaagtagacagtcataacaaaagcattgagagtaagcaaaagggcactagtgcaggtaattagtgcactacacatagttgatatttgttgtttcccggtacaatgttagctcttatagaatttgttagcatatcttcaggaagatacatagaatatggatcactccatcattgataaatttgttgattgtggcctttgttcccttgttacaaacagttgaacttgtgattatacaccccctcttcaaatgattgtttttgtggcaaattagtttgattcagaaagtgccagaaaaagcaaagcgagtgcagtagcaatttgtgggtttgttgcctctatttgacccaccaaggcatgacattgctgagaccataagacgtgcttttatgactgttgtcttcttctagacgctgctcttccatcgaatttcttcacggtaagataaacatattttctttaaaatagcagaattatttttcaggcttaacctctctatacatgaaaatactggcaggacatatttggcgtgagatctatcaagaacaaccatcgtgagctcatagaagttgtttatcttcaagtattgtaattcaggctcccattgctacacagtcaaggagctggacttacattgaactgggtttgttttcctaatattcttactcttgcatagaaacaacacattaatgattgtaggtattgtgttttatggattatttcttagatagccatgatcatagctgtgtatgtgaattggggctttgcaaggattgaatggagtcaggcaggtgtcatttggctctatagcatcatttaatttcttcataccattggatatattcaagttcatcatccaatatggattaacagacaaggcatggaaatataatcgagatcagggcaacatcttaatctctgccaaatttgttgctcaatctgactgcttttcagtgttgtgatgcaggttgctttcacttcaaagaaggatcatggaaaagagggagagagagagagagagagaagcataagggctgcagctcaacatagtttacatggtctgaatcctcttgaaatagacaaaatcttgaatgaagaaaacaactatagaaaactgtttgaacatgctaggaaatgtgctgaagttgcaaggtaatgtacattgtccaggatacctttatctttgattttcccccccttaattaaagccgaatccaatccagaatgtaatctatttggtttgcaggttatgggagcttcacagtttacacactaaagggccatatcaagtctgttgtgaaactccagggacttgacattgagacatttcagcagcaatacaccgttagagtgacttaagttctgcgcaaaagagaggtttagaagacaagataaaagcagcacttaatctttggaaattgtcattattatttttcacctcatgaatcatgatgacaatgaactgtgatcttttgattccttttagaatttgtcttcaatattttgttatatccttcttcaatatttttccccggcgagagagataagacttttttgtttttttgtgaattataagactttagttactgcaaataaataaataccaaatctcagttttcttgactacgcttcatcaaaatgcgacttcctgaattaagtacccattagtttgctggacttgacgtgagattactcaaacaatgaagcagaatttagtttatccctctacccccatcttattagatattgagttgcagaaataatatgttttaaaccggtcatttcatttcttcatgctttatacatatttcacacaaacttgaaacatgtcccaaaaattactattcaacgtaattacatttcatttttaattttattttatgaaaaaatacatttatatatacatgctaagaccatgtatgggggctgatggcttgaattggtgaccttgaattggatgttgtgtacatatgatgagaaacaaaaggtgattcagatgtatttggatgacttttttaatttaagaatgcaaatataaagtccatattatgggtaaacattttgaaaattgtgataacatatacccataaactcatctttatatatgtgtgcctttattattttcattcttattaagaggtttggagtttttctataattatatgtaattagaactgtaattacagggaattgtcattcaatttacaaacattattataaaaaaattaaatgatgatctaattttaaacaaaaaactttaaacattgttaaaattgtctaaatattaaaaaatagtattgacattgttattattgtcatatcactaatttcattattcaaaacgaaaatgtttgaaaattttattaaatgaaagatatttaaacatagaaataatattaatgannnnnnnnnnnnnnnnnnnnnnnnnnnnnnnnnnnnnnnnnnnnnnnnnnnnnnnnnnnnnnnnnnnnnnnnnnnnnnnnnnnnnnnnnnnnnnnnnnnnnnnnnnnnnnnnnnnnnnnnnnnnnnnnnnnnnnnnnnnnnnnnnnnnnnnnnnnnnnnnnnnnnnnnnnnnnnnnnnnnnnnnnnnnnnnnnnnnnnnnnnnnnnnnnnnnnnnnnntattttaatttattttgagaaaaaactaaaagtaagatcatttactcaataaaatctaattgacttaaatataaaatatgattgtccaaatttaaaataaagataatttaatattaaatatttaaatgtataatattgctatgattatttttattttatattatatttttcaacatgttaaaataaagacaaataaaacccgacatccccgggttaggaaaaactagtatagtacattagggatttgcaatgttttttttttaaatatatatatactttttacataatgtttgagatcaccaatataaaaaatgactttctatattagttacaacacaagctaatgcaaaaaatgatttttttttatatcaattgtgactaaaatctatgcagaatacctctatattaattaattatctttaaactagtgtgaaaaaaaaatttatattaattttgaaatcgatatagaaattattgattttctatatcaattgatcatatatctaactattcacaaaattatttagaatataaaaaaaattgatgttaaaagcctttaaatttttgtactagagttgagtaaaaaagatattggaggtgacaagcttataaaatcataggtcaaatatgtattgagcaagtctcaaagacttgtcagttattaacgggataaataattcaagttgcctatgagtatgcttcaactttaggcaattgtgtcaacataaggtaagcgtcattgctaaaacggaagagtcgagactgtcacatattcatacagaggttacttctagttgccttccactctctaccaaattaatcttaattggaagtttcttgttgagcatagtcactttttttaggaaactaatttacacatctatacctatatgttgctgtgtaaattggagcaattcttccttctaagctttcaaacagttcatgaataaacaaattcaatactttattttcataattcacttttactttctcttttatgtgattgcatagaaaatttggcatggaagttggagaagcttgattgattgagttggttccaatgtgccaccaagcttaattaacatgcttgattaactttgtggaactgtagatatacacggtcacaacaagtattgcaatgcgattatatatttacctgatttatttcaaatctattcaaagtacttagtatattttctcattgagaggggtcccaaagggggtggggcttttgatgcaaaatatgttaaggagtaagagcaagaccaagttgtcgtccatggcacgccggggaccgactgacatatcacttcccactaatgggtttttttctttctcatcattgattgtgacccaaaagtcatattctcttttttttttttttttttggtntttttttttctttctcatcattgattgtgacccaaaagccatattctcttttgttttgtctctccaatcccaatattttctctctaatgtcattttgtgaatctttgcaatgaaaatgtgaccatgaatggccttttcaaatgataaaaagataattcccttggcgtgtaagacttaagtcccttgttggatagtgtttgcgctctttatggcttttttccatacatatcacattataagtttgtcatactcaatcatggtataatatatctttgatcttggacatgataaaaatcatctcatgtatacttgcttttattttgttttatctacttcaattattgattatattctcacgttgacttcccttttcatctgtttgaaatttttctcacctagaaaatagattgatataaacaaaagttaaaaactactttggcaaatatgtctttgtatggagaaattataggatggtccagaagaatcatcacgtatttatgattttggtcaatttcttgactattggtttaaattttttgttgcattgaaaatcctacgaacattgatcataagcatggattttggatttatattttttaatttatttgttttgtgagtgtgtgtgattgtcagcaattgttaactaccagggtatggtatcaatgtctgtatgtcatcatttttaggaatataacagaactaaaaagcctcgtgtttttgaattggcaaccttctcttattacaaaaaggtaacaaagatcaccagaaaaaaaaaagggtaacaatttttttgtttcctttagtattactgtgaaataaacatccttttgtctccaattgatgcctaaacatgtgaagagatagcgataacccaaattattatagttgggtccaattattatttagtgtctcacaaatataattctaactttttaccaaaaataaaataaaataaaatataactcgtaagaagtggataaaagaactctatttatataaataagattgatcatttctaaatattcaatcagactgctaatttcaaagcatcttgtataataactgaagatttcttaaatgctaatgaaattggattcatcgatcacagtcaaaaggtattatttgaataaaaattggtgatcacattaaaactatctaactttatgtgtatagattaatttcttttagttcagaacaatcctcctgttttcccgctacaaggctcacatgtaactattgtaagtgacataattgagtttaatttttaagtttcgtaagtgtaaatttttttatggtatcagctaattaaaaatcataatagatatcaattttaaggcgactattattataaaagtcggtaccttatcatattaaatatctttatacttcaatgcaactatctcgttataatagtttgtttgactattgaccaaaagacaaagggagtaggttcaagatatatgaaatgtaatttacaacagtttaagaacatattgtaaattggttcacaggggaatccagagtacagagaaaataagatctgcctatgtgaacaaaaagctaaatcatatctagaatagggattagggacacttgaaattcaaaacgggattctatcttataacaaaagttaaggggctctataccacattattgcaatatgatttcagaatttctacgagcaaattgggggaattttctttcgacaaaaataaaaggggagctgctttagctaaattaagagaaaaacaaaataaaaatagtctctattttcttggcttgcaacaattaccacaatataaaagttggttcattgggaaggcaatatgatggccttttcatatatttgataccccacttggttactaagtgacgaagaagaatcatttatttactttacttaacgtaaagctcatactttttgtcaaatcgttttctccttcaccatgctttaaacaaatattactttggtcatgcagcataaaagaggcaattggtggatatgccactcagaaacataaatatactattcataaaaaaaaaaaaaaattgtgacaagttgacagaaactatttgagtggtgacaggaatcattaattagaatttgattacacattgacttcctgctacaaattcctagagttggagccaattcaaaggaaattcatcaacatctttgttgagtttttctctctgttattgttgtcctggagatttcagactcacataatcctatttatttatataactaatttgagatagattataacgaaacgaataaaaaattgtatgtggcttgtatttcagaaaatggtttgaacccaaaattaagcatttgttaacttaaatttcaataagggcattcaaagatcaacgttcttatccacggaaaaaaaattgtcaagttgagatttattactaatagatttaaatgaagttatttctatgaccgagtaagttatgcagcattcacactaaaaaagatagattttaatttcttttttttttcttgtcaataattttggtatggtgttagaatgtacatgctgaacaaatataaaaaaacatattaggacatataaaaaaattcgtacaagctgaaattcttaaatcgttaccccttttcttttatttcaagaactagagacacgggtcaaaggaatccnnnnnnnnnnnnnnnnnnnnnnnnnnnnnnnnnnnnnnnnnnnnnnnnnnnnnnnnnnnnnnnnnnnnnnnnnnnnnnnnnnnnnnnnnnnnnnnnnnnnnnnnnnnnnnnnnnnnnnnnnnnnnnnnnnnnnnnnnnnnnnnnnnnnnnnnnnnnnnnntttttttttttttaaaagaacgtgttatgtaagttctacttttatttacggaaatattttgtcacatatttcttccaaacacaaaaatcttctgacataaaatgagttgttttgtttaaattcccagttattactcaagtttatatttggctgtagggaatcttatgacactagtgcttgtgatcttacaacttaataaaaaataaataaattaaaaatcactttgtttttatatcattattacatatgaattatcaaacttcaaaacaaatacttgcataaccaaaacaacaataccctttaatataatgatataacttctttttttaatttttcaaatgtgtcctttatagaaagcaattttaacaactaacgcgttcatcaacaagagttagaactaggaattgtcacttggtaaagactttactttagcattacacaccagaattctttttaatggataaaacgaatatttatactatgaaatgagtttagaagtgtttactcaattcatgccaaaatttattgttttatatttgtataagtgttgaaaacagtaaggttaggttacttcaataaaaaaaagcattttcttattcaaaacatcttttagctggtatagctagacatgcatgtatttgctgactagaatatatttctacaatataaaccattatagaatatacctaactaggtcagtataatcatattaaatggtcattttcagagaagacattcattagtacaagctacttcaaataaatttcagtgactacagaaatcaaagattaaatcccatggttccaaaaacttcctcaagtgcaagcctgtgcagttatagagacagcatgacaccaattcatgaatggagtctaggcttctctaggttccaggtacacactatataacctaccttatgacagcaaaagaagaaaaaaaaaataacaaacccttttctcttttcctaacagaaataatatgaactttaccaacacgttcaacccccatctactcacacttgatggacctgtatatgtgacgaacaaagagcagggaggcacggaaacctacactaccaagcatgaggaaaaagccatagcagatgcaggccatgtaaccgaagaagaacgaagtttgcataaaaccagacatatctgatcgtgcatagtagtaatacaagcaatagccgtagatgaacaagccagttgatccaccacaaaggaaagacctacggaaaacacaagccaacagcaatgtcatccagttgaaagctaagtgctcagggtatattaaaggcttaaattccctctatcttcaaaagattcataacatcattgttaagaaaataataatagtattggctaaaaaaaacacattccagcagaaaaaggaaaaatgttaaggcaataaatggcatgatattgtactaaacccttaatattggactaagaaagcactttgtttacaaagttgtgccaatgtcattcacttaagttttcttctttgccgaatttgaacaaaaatgtttttatataggtttaggcataggccatgcctggcattgcccatgtgctcagatggcccaaacctttatagtaggcccaaattagtttaggtttgatcctaggcccaaaaatttggctttggtccaaaacctagccaggcaatgaatgcaacagatactcgagaatgccatccaaaagaaaaatagtaacaaacaatattttgtagttgcatctccatatgatgagattgatattaaggcaattatagaaaaaacattattctttataaatgatacactagtcctagaaaagctaaatattctaaggtacatcccttccattacaccatcaacaaaaatcttaccaatgccgccgactagtccttaaataggtgggaaaactaattttactatgattgcctggacacttatctgcttgtttgagtagagacagaatatgactagtaggaagtctatttggacacaataaagtctaatacataagtactttccatctattcaatcaaacaagaaacactattttattctacaaaaactctggtataagtcaactgagttaatatacatgattcatagtcattttacagaaaattgacagatcaagtatcaacatcaacatcaacaacacctttaacatcaagtatctatggtaaaaactcaaaaatcccaaattaaattgtagccagttgatgaattgaactagttattcagatagggtaatggaaaggcagaaaagagagaacaaggacaaggagaggggaaaaaaagaaaggaaactggcaacttaactcaaagacataactgagttcaagatccaagtagatgaccttatataaagagtccacaatttacaaaattacatgcagaataactaacattaaaaaaataaaataaaatccaaagtttaaaccttaatggtaaaatctaaagttatgttcatatgctgatgaatgtcatcacatgtcttccactccttgttgcgaacttgggatacccatatcaccattgttaattaactcaatatttttttgaagagaaccaatgaggaagaagggatgaggatatgagatggaaggaaatgacccgctcccctcccaaacaccattgagagaaccaatcacataaacttcctaattcaccctcaaggccttctaatctcagcaaaactcttatagatatacattactaagattacatgcattaaaattgtaacatgacaaagtattgtggcatcttaaatattccttttttctggaaccaacactgtcatgaacatacatttgactaagtgggacaaaggccactaaaactatgtaacttaaatctaaatattagaatatatgaagaaaaaaaatccaataatatattgattgtatattagagtaatttagtgtatcttagattatcaattacgattagtttccacaattccttattatctctttggattggtatccttatttcattatatttaaatatttaattattagtttccttattttagtagggattatgatctaatgttagtataaataagtataattgctttatattttgtaacaaatcatatcaagtctatatcaatttcagagtatccagtctcaattatctccttttcctacaacactactaaaaggctttaaccctataatttcaacttggtattagattggtannnnnnnnnnaaaaagagagagagagagagagagagagagagagagagagagagagagagagagagagaatgccctacatttgttcaaccagaaaacatattttctattttgttaatccaaaatgccattaaaagcctgtttcacaagttatgtcaatagattatgatttaagattccaactaagctcttacctcaaaatgaatattaaggtattagcaatataagcgatcatttccctggagaaaaataaataaaggatcaaaacacaattacatttgactacaaaatataaatacagaaaatgaggagatttcatatggcaaatctaaggtgtgaccttactgcagcaacaatgcatatttttttgtttagaggtttcatatgattgactgttttagcttaattagagtcatattttttgttttcttatgtctttatagagatagtnnnnnnnnnnagggattatgatctaatgttagtataaataagtataattgctttatattttgtaacaaatcatatcaagtctatatcaatttcagagtatccagtctcaattatctccttttcctacaacactactaaaaggctttaaccctataatttcaacttggtattagattggtactgtcctcctccatgacctatctcaccactattagattggagaaaagaggaaaggaaaatgaacaacaacttttagataatagtaattataatttaatattatacttctaattttaaatattttattcaaaaaatataagtgtgaatatagtaaagaatttttttgatactttgtggacaaagtagtgaagatagagaagttatttctcgctttctaattaatagcaaaaatataaatatgccaacaactactttttaaaacttccccctcttttcctagccattgagtcattgaccatatcctttaaaccaaggacaatatgaaaactaactgaattactaatataagagtagataatgtatttctagtgaaaatcacattacacaaactcaaacaactatagaaggtagcaataacataagttacatacctccaccaccattcatgatcctcagcagcaagttggaagtacgtcaaagccacagtgatgaaagcagtgacaatcaacagaataatgaagacaatgaagagtatgctgtagatggtataaattctgtggccccatacactagcaaaaatgtagtacagctctatgtagatggcactaaaaggaagaaatcctgccattgccatctggggaatggtactcctgtaccaaggcagaggtggaatctctcggggatattttgtagtgcggacaggtgcttggaactcagttttgctattcttacctgcaataccacccaacacaagcaatggtgaagttaccaatgtccatattaggactatcaccacaattgtgccaaatggcagggcagcagttgcactataagcaatggcaacagtgttaaggaaacagaacatgaggaatagggggccacaaaagaggcatcctgtcaacaataagttcctaacctgcccacaagaaaacaaatgtagaaatcatttaatttcatttcataaaaattatataaattaatacagtcaaaccatgaacaccaatcaatggaaggagtccatatgtacccaattagtcccttcaagttgaatatagaaggaagtagcagtgtagccagcgatgccagatgtgagagcatatatgaccaccagtgcagtaaataaagcacctcggttataaggataaaacacaccaaccagtgcaagcataaaaatgaagatcgtactgcacgagcataaagaaataaagaatggcattcattacaatatagagagaaaaaaaaatcaacacagggagaaagagcaattagaagattcttacagtgtgaataactgagtaccagaaccaagggctgctgaaaagaaagacttgtgctttggaaaccggaaaacatcaccatgaatgtacttccatcctgtctcctcttgatcatcagcagcttcctcatcttgggcatacctggagaaaattacagacaaaaacaataaacaaggggtgataataagattaataaaataatgttataggcaacaagatgactaactgatgatagatgagcaagaaagtcatacttcataaagtcattcttcaatacacgcatgagaatggttgccagaaaaccagtcaaaagaagaactgttacacaggagtttatgattgagaaccagtgaatctccaagtgatgtggcaaagaagaagactgagagtatttatccattctcttctcaaaaggtgtatctgtttccttccattttgcagtgtacatgaactcaacatcaacatctttatcctcagtcaggtccaccacagaatgaggatccattcgggcactgatttcaatcactcgatctttgttgtacagaatatcgaactgaatgtgcttgtaaagaaaatacctatactcactagggtcagttttcccttccttgtcaaccgtcccaataaatccccagatcggcaaatcatcataatacatctggaaataatagtccttcttaactgcttctcggaactgagcaacttgctcctttgtgagcttcctcttgcatacaaccttagagtctttctccttcttgaaactaagttcgtaaggagcactaacaaggcgatcgccattcaacacctcaccgagggcttcagtcttttctttctcatgacctgccattcagatgtactcattttacaatgacatatcaagaacccataaaagtataaaaaaggacgaaggaatatccactaaacagagctacaaattgacatttccacgactagagatttcattaaaacaaaaacacaatagcaacccagtattctgtcccttcctacaactgaaacaccaaaactaaactcaaaacctcacatgctaaaactacatcacgagttatcacactcttgtattaataactagagaaagagagagagagagagataaacaactttgactaaatcaaataacaaagcttcaattatggaagtaataaataaattcagatagttagttacctgttacacagaatggcaggtcaaagtatcgatacgtttcactgaaaccaaccaattaaacaaataaatgagaaaatcagaaagacgacaacctcgtacaacactgacgttgcaatccgagataataaaaacacgaaactgaaaacaagatcagattttgacgacgacccagaatctaaaaagggtaaaattaagtgttagagaatcatgggtgtggttgggaaatgggatctcaaggagacgaacctggggttgtgaaagggaccaactttgttggcgtaaagaggaacggattctccatccttgtaacggtgatcggaagcgtcggatctaacgtgggttccctgaaaagagatcagaatcgcgagaaccaaagccaaagtgcttctacccattgccgctgcactctcgttcgttcttcgcattcagatcagatggataaagaacaagaaacacacaaagacaataagcaagcaatttattcagtacaaatttctgaaggaaatgacacagtttattttttaaaaaataaaaaacgaagttttgtcttttttctttttcttttcccattttataaatctatttttctctattttttatatttgagtgtatgcatggtgacccattatatgttactatagtctctactgttttacttggcattagcctccatcattcattaaaaaaagaatactgctatttatttaagggaattttcaagataacaaattacttgttaatataactaattaaatttaaacaagatattaagtttttaaatagttgtatctataaataatttgtgcatacaaaattatttatatatttacataattcattcataattaaacactaaaaaaatatgaatcttgatgtagtttcccttaaaattggctttggtctcactgtcaccatgattctaacactcaagtcacaattttttttttgaagaagactcaagtcaccataagagacagttgaagggtgggaaaattggagacacaaaaatttgcttccatgtcttactgtttttatgttgggtttgtcccacactagtggtggtgattttgttggtaaaagtaaaactgcatgatacgccccaatccaatattatgtgcaggaaattgctattcacaccacaaatttcactaaaaactcctttttgtagtgaatcatttattaagaaaaatgaatatatataattcacagccatatgctttaaaaaattattcccaaaggacctttttgacataaatacatttctgttgtataaaatatacaacagaaacttatttttgttgtgtaaggggtgcaaaaatacacaacaaaaatactccattgtatatcatatatctatatatatatatatatataaggaattgtgatttcactttcattttactttttatagcaaaggattttcgcttaagtaggagtaaaacaaagtatatgtaatacaattttagcaagaaataagaagattttgactctggaagtaaatttgagagagaaagtcataccacatgtaagtttaagtatgtaggatcaatcacataagacagatggttaaattaataagaatgtcatatataatacaaacagaatagttaaatggagagaaacatggagaattatttgtgctcctagaatgactaccaaactcaaatgcattgtatttctataacatttgtcggtacaacttaaaacttcaagtaataacacccatttaaaaatacgtttattgttaataaaatacagtctcgtggtctattctatatctatttgttctaatttacaatgttggtgatatagaggcaccatttattgcacaacaaacattaatcactaaagattcttcaccctcaagattagcgaaaagatagcgtgcttggtgagtcaatcctcacaataatatcttcttcttcagcaccagaatcatcacttgaattatctccatgatgatgctgtcttcgttctgtgctttgtgaaggtggatttgtaacatgtcttgtgacctcatggaccttcttggcagttgcagctccttctgatttgactgaaacaagaggacggccttgatgtgacccaatggttggataggacaagctatgaagtggtctaccataattggttaacaaacttctactccggggagggatgtccaccttgaaactgagaattaattaatggaaaataaaataaagattaacatttctggtgcaagccaaataacataataggaatttaagtttgttagtgagaataatttctcccaatgtctttttggtctccctccttcccttttcaaaattgaagttgatcatttgtaggctctaagtttgatttatttgcagagattgattgctagaaattttaaaaaataagccaaagctcttttctaataggaaaaacatccaaggatgttgatcaagctctaatcctactcttctttgcaactgtacatgccacaaaactggaagtcaaaaagaaaacaagatgcacactgaaaagttaatagaaagcacattaccataaccttgtattgaacaagcttcaaatggaattcttaaataacaatgtagatatctgattgtataaaaagctttaattaaattgaaaaacatccaacaatcaagcatagtctcccaaaaattttttgtccttacagatgcagtagtgtcttataataatgtgcctttcctttacttttaacctaaattaatgaactgtaaaaatttagaatgtttgaagcagttaatcaaacagtaacaaggtagagacctgatgaggttcctcctgttgtaaatattaaaagaattgacacaaataatgaaatactattcaagttaaacaactcttaaggactgaaacaaatgcaaaagttcccataccattcagaaggcctactcgtatgtctttcaaattcataggatctaggttactatcattttcaggtgcaccatgagggtgaacactttcaccttcaatgctatttaagcaggagatatatctcttcactgtggaccagtcagcagacccaagctcctcatcatctccaggttcaccaaaagcctccaatgccttgttcaacatttcgtactttgtgaagtcaaggatccgtctctgttattacatgagcaaaacacaatggccagaccaaatataagtcagaaagaagagaaacgggtgatatagagatattttcatttggaatcaatttacaaacatttatacaatgtagaagctttcctttgtttctcacaatctatacttattcgtgtataaatttatacaaacccaaatgtttatatagcagttatgaagcctaggtactccaaaaatggcagagtaatggcacacccattaggagatcatattttcttgcaatgaaacttggctgcattgctgtttttttcaagcctccttggctctctaatttctattagttgctctttttatttttactttctgagttattgaacaacaattctaaatacatcttcagtgctatatacaacagtgaattatatggatataagatatttttcagggtattttcttagatttaagagagagagagagaccaacaattaggataaaagctgaagacagtagggaattacttaaaatatgagatatcaaagcattatgtctctcaaaacgacaacataagttgaacatagaatatcagaaaaaccctgaccttagcagctgacaatttattcatgccaaggtagtgtaaaatgaattgtgtggttgaaccatttattataaatgttaaaaacacagttccaccagttaagaaaacaaactacacatataattgagtcagtttataaagacaactaagatatcaaggatttcagggttgcaatgactttacataattttagcaaaattgctgacatgctcttgataaggataatcatagcttttgggattttagccttagtcaatcccacaaaactagcttgcaagttaaaagactgcccaagctttataatctctctttaagtcatatctctagtcaatgtgggactaaatcatcacccttgattgcagcccctgaacagaccgcaattcaggtgggctagggtgacctttaagggaacattccaacacataaaaacaactgctaatttctttcacattttccactagcaagtattcattttttttcttctacaaatcctattgtattggaagatgaatatatctcattattcccaattcataaaccattattcctattccattatcagttatattttatgactaccatcatttgccttttagctttggttagttagtttcattgcttggttaaaggagtttaccatattgccctttctctttttaagttcccttaaaaataaaagctcttccttttatcagaaaaaatctaaacagcagctatctcacttgtaaacaatgataaggtacaatgcccatgaataattatatctataaagagggctataaatatgcatcattagtccatgaatacttgccttaactgataacgagagtgccaaggcaactgcgcctcacaatcctgaccagatgagaataatagcttctttccaattcaaaccatatccaaaatatcttagaaagggaaataatgctccaactacaatgcaccgagacacttgaacacatgcatacagaagcaagaggtggatccatgatgttcctaaaacagacgcaatacgttgcagtcactctttttatactttacaaacatgagtacttaaacaacataaaaaggcaagcgatactggcaagagcttctagaaaacgtaagcttatcaaagcatcgaaattaagttatcgctgcttctttgagaagagcatgatcatcagagttatttctttccaactttcataggcctctctcattgtataaggtttgttactagagagaaaccaagaactaaaacgcaaattattatcaatttcaatccttagattaaaatccttatacgctgagaagatttctgcagttgcattatgcaagacaacacggatatatgattaaaagttaacaatttgaagaaattctatcatttttattttgaatctgcatggacttgccaatcccccccctccccctcccaataatcgtagatacaaactatgaaatacagctttctccagcataattaaaattcgtcagcacaataatacaagattgcaatgaagtcccataatcccattcattaacattattttcatttacttgctttcaatatacttcatggtacagattttccccattaaacaaaaactaagaatataatccatggcatagtgcaaaaaataagagaatatatgaagtgattcttcaagtcatactaccatgatagaaaatattgttgtcaccaagtactccttcagctataactccactgcaaaaagatatacgaaaatattaatgnnnnnnnnnnnnnnnnnnnnnnnnnnnnnnnnnnnnnnnnnnnnnnnnnnnnnnnnnnnnnnnnnnnnnnnnnnnnnnnnnnnnnnnnnnnnnnnnnnnnnnnnnnnnnnnnnnnnnnnnnnnnnnnnnnnnnnnnnnnnnnnnnnnnnnnnnnnnnnnnnnnnnnnnnnnnnnnnnnnnnnnnnnnnnnnnnnnnnnnnnnnnnnnnnnnnnnnnnnnnnnnnnnnnnnnnnnnnnnnnnnnnnnnnnnnnnnnnnnnnnnnnnnnnnnnnnnnnnnnnnnnnnnnnnnnnnnnnnnnnnnnnnnnnnnnnnnnnnnnnnnnnnnnnnnnnnnnnnnnnnnnnnnnnnnnnnnnnnnnnnnnnnnnnnnnnnnnnnnnnnnnnnnnnnnnnnnnnnnnnnnnnnnnnnnnnnnnnnnnnnnnnnnnnnnnnnnnnnnnnnnnnnnnnnnnnnnnnnnnnnnnnnnnnnnnnnnnnnnnnnnnnnnnnnnnnnnnnnnnnnnnnnnnnnnnnnnnnnnnnnnnnnnnnnnnnnnnnnnnnnnnnnnnnnnnnnnnnnnnnnnnnnnnnnnnnnnnnnnnnnnnnnnnnnnnnnnaaaaaaaattgttcaccaaacctttaaacaaactttttggttgataaaaaaaataaaaaatagttgaaatgacacactcatgtagtaagtaacataggtttattaaaacacggtttgaaaaggaaactctagatatataaatggtattcaactcgatttcattttgttattcaaaaaacacctacatttgagctactacctttagaccataaaataacttttgttaattgtgtgaggcatctccatgattagaaatataaaacagaaaaaaaaaaaacacaannnnnnnnnnnnnnnnnnnnnnnnnnnnnnnnnnnnnnnnnnnnntatcaagtgtaacactggaaattaaaaaaataaaataaaatctcccatagaatgaatttagtttatatgcacaaggacaagtgaaaaaggcataccaaaactgatgtaagctttgttgactttcacccttaaaagctgttcttgcaaatgcagaatagaacctgtagaaagatttcaataactagatttccaaaatgggtaatagacatttttttactaaaggtcaatttacattcccaaagatatcactgtcaagacaacagagacacctgaaccctcctgagccggcatcctacttgtataagtattcataatacaagtataatctctaaatttactaaaagatgaattcaagtttgaagggtaattacagtgaaataagcaatgtagctaacagcaaatgtttgaccaatcttaatcactgtatcattaaaaataaacgcaagccacaaaacagatgcaatcccaaaagcaagacccattcctacactggaccgagcaaacagtcacatgagcaaagataattttcgccactagtgcaacaaagaagtaggtgaaacctacgctccaagtgaaacttgtgttagaaatttgattatagcaacccaattgaaggtctctccaagttccatccgatagaaaagagtataaaccacaatagcagtcctggacaagaatgaggcttaagttttgtcaaaaataaaatacatttaaaaaaccatcacatgcagaaatagtcattgtacacgttcaaggctttgagccacttcttacaacctagattcatttggcaaaacagaaattcacttgaagagtagatgttagttaaagaagagcaaagggtactaaaaatacccatcattcatcaaggattccccttcaattatcgtgcttagctttttgctggcaccaagatctttcaacaaagccacaacagcaacaggatcagttgcactcagaagtcctccaagcagttttccaactccagttgtaaggaaaagtaagctgtattgtgacaaatgagctataatcgtataacacaaacaatgaaatctaaacacatcggttcacgtaccttcaaaacaactcctagacaaacagtagaaagtgcaacaccaggaccagctagtaaggtcatttgtgcaagacaccgctgcattagtccaaaatgcatattgtgatggaacatcaggcatcttataaataacagtcagtgacttatatttttataaacaaacatcaagtctgctccctgtttagcagtgtttaatgctagctatgtctgatcttgttgatttaatttctacatctttcattagggaatactggtaattgtatgaaataaaaatatttagtctcatgttgtgcattaaagatttcaaaataattgatatttgacttagaattgttagtttctggcacagttttcaagttggtctcctttagtttacatgacttcttggttagattttgtagggcatttggattattttgttcaagtttcacactattgatgatgcttaattgtgaacatgttggctactggggctttgtggaatttaaaaagcaaataaacaaacacaacaacatacatctagaaaagtcaccaaagcaagcataaattactaataagtaggcaagagtttataaactagataggaactatcataacagaaaagcaccatcactttataactcaaatttagtcgcagttatacataaacttctactcaaacagcaacaaaaacagtactttcgaaaagaagaagaaaaacggcgacaatgatagcacgcgactaatcagaaatatataataactagtatggttatccgtgcatcgatgcacgggttgttattttttcatataatttatatttaataataattaaattaaaaatatgagtttataatcaatttaaaatttaatataataaaaattaatttaatcagtatgtttattaatttaagaattataaaagttggatgtaatttttttaatatttttatcatcaatattattacttaaatttgtatgctaattgtttcatagcaagtctttttaatgtctttttcataattggaaaggacatgtaaggagaagaagagaaattaaaagaaaaaatagaaattttaaaaaagaattgaaatgatttgataacatggatcataaaaattgaggtttaaaataattattgactaaaaaatgttagtaaatcatgattaattatggctaatttaattaaaaataaattttaccaaaattattgacacttaattaaaattttaaaatgtttaattaaattatagctaaaaaaggagggaatatgactaatttaataaaaaataagtggtgtattaataatgggtgaaattttagcggaaagatggcagaagtaacaatttatatatatatatatatattatagattattatgatccttttaaaaaaattattataaatacaaactacaaagagaagcaaagataaaagtgtaaaatccgaaacctttaatatttttttttgctgagtatttaaagccttcaactgcacacattaaaatcaactacaaattcaagaattcactaaagaaaaataattaacatgctactttttagataactaaataaatataaatatttttctacaaaacaaacatgacattttttcaactcaaaacaaatgtcatgaatacaaatgttataaattaaataactattgctttgctattttgaattactttgtttttctcttatttttaaatattttttaacttattaaatccctcataatttcatgcattaaacttgctacgttccattggaggacgcacccaaagaatacacaatctcactttcctttgcatgatactgtccctggaagataaagagtaatggcacacatcattaatttcgaatgtgtgtgtcatcataatgacaacaactttattaggttggagaatcatatggtgaaatataaagttatacctcatgtcatattccatcagtcgtgacaacaaataaggttatccgatgcttattttgtgagttgtgatgctaccatttttccattcgtcaatatacaaattgggtctcttaaaattggaaaggacacatgattattaccacaaaataataaacttgaagattacgaagaaatgacaaataatgtaataatgaaagagcaaaacttcctctatctttaaagagcctcttgatattttttttcaatttataattaatgtaaaatgagaatgaagagttgcacatttagagagtactggaaagaatttaagattcattcaatataaataaataaaaaaatagggagtgtgataattaattgtttcaatgtcactttaaggtttcaacaagaagtattatttacatttattgaggagtgaaatgttttcattagcatgttatttgtttaatttttatacaagaagtattatttacatttattgaggagtgaaatgttatcattagcttgttatttgtttaatttttagattcaactaattatcaaacttgatagttaatttataattgtaccttcaatatggatgagaaaataaagatgatggaagtaagaacttttatatatatatatatatatatataaattcatcgattaaattttcaatgatcgttttattgacaaatttttatcagttgaaaatttcaattttttttgtaatgtttataatcgaatattttaatgaccagtgatcaagttaaatcttgagtggtatctcacctaaattttgtatataaaaataagcatctagtaagctatattaaataggaaattagggacacccatgaattaacaaacaataatgaatctcagcatgaccatgacttattcaaagccaggtactatccagattccttttaggttcccagaccacgtcctttaatatttctagatcataaaagcaaccgtgtccggactcgttgattgtggtatggcatagaccctcctccacatgaacatgaagcatagcagacccattcaaatgtgcccaaacagagcactagagtttagtttaggctatgccttacatttttgtcttcattggcttaagtagttaagttaaccatcttttcctttacatagaaaaaattaaaagttttggtcactttggaatgggtcggcgcttttcaataagttgtatagaatttcaatttctaccactacaagattaaaatcctcgatacgcgcactctcctactcggtttacgcggtgtgtacacattcttatttaaactaacgtcggcactcctcagccttcattttctctctctatctctctctctttcagtgcccaccaccattttcaatcaccatttttaacaacatggcttcacaaacttcagcaccgagattgattcctgaaaggggtcaagttctaaagagggtcctcaaaatggtgttttcttgtttcatgtgtgctggttcttcttcttacaattcacatcatcccaaaaccacttcttcttctgtgtttccagcaccttcgcgtatctgaatctgttcttaattatattggcatttgacaactcgtcaaattggatactgggtttggccgcaccacaacattgttcttcacctccgagataaatatgggtgtcgaaaagcaactggattagttaattaatctcatatagttttcgaaaagcaagcttgtgttgtaacaattttgtttcctgtattcaaaagtgagccctttattatcactttgatcctgggcttgcaaatttttttttgtagtttcgaatgtggaaatcttccttagagtttggttggaaattttaaatattcttaatattaatgttataattgggccatacggaaattttttgtatctatctcaatcgttatagacttttactaattatattaatatttcttgtttgaagaacagccaaaaagtaaaaattattaatctaaattaaattcaacggctgcacccgcacgtgcacgtgtgtggtgattatttggtaggctagcaaccaacgtcattatgccaaagaatagaatcttgtcttgaagctgtgtcactgcttacagacatcgtgctagttactatagaatggaccaatgattgttagttttagttccagtgttcaaacataatttgaaattgctataatgtaacagtagtacactagtactccagtcttatttggatctcaaatactatccaatatgaccgtctcaaacatttttattggagtttgcctacaatatttctttaatgaatttttacgagagattaaaggtctgaaataaatataacaatgatgagaaattgatataaatatgaaatataaagtaaataaatcaataaaaataatataaaaatatagatataattatatttaactcaatatacagtatacttatattttattttttaaaataattatcgtatttgtaaattatattaaattgtattatatagtatcatactcaatatttgtattcatgcagtgcaacataaattatatttagtaaaattagttgaaaaattaatttaaaactgaaaagttaatcagaacataaaaagttacctaataattaaaaaattatattattgaatcataaatgtttgacaaaattatatgttaaaatagctaaaaaatataaaattgtataaaaaataaaaatagtaaaatttttaccttaaatagaaaatattaaaattgaaatctaataaatatttaagtgcaaaaaagnnnnnnnnnnnnnnnnnnnnnnnnnnnnnnnnnnnnnnnnnnnnnnnnnnnnnnnnnnnnnnnnnnnnnnnnnnnnnnnnnnnnnnnnnnnnnnnnnnnnnnnnnnnnnnnnnnnnnnnnnnnnnnnnnnnnnnnnnnnnnnnnnnnnnnnnnnnnnnnnnnnnnnnnnnnnnnnnnnnnnnnnnnnnnnnnnnnnnnnnnnnnnnnnnnnnnnnnnnnnnnnnnnnnnnnnnnnnnnnnnnnnnnnnnnnnnnnnnnnnnnnnnnnnnnnnnnnnnnnnnnnnnnnnnnnnnnnnnnnnnnnnnnnnnnnnnnnnnnnnnnnnnnnnnnnnnnnnnnnnnnnnnnnnnnnnnnnnnnnnnnnnnnnnnnnnnnnnnnnnnnnnnnnnnnnnnnnnnnnnnnnnnnnnnnnnnnnnnnnnnnnnnnnnnnnnnnnnnnnnnnnnnnnnnnnnnnnnnnnnnnnnnnnnnnnnnnnnnnnnnnnnnnnnnnnnnnnnnnnnnnnnnnnnnnnnnnnnnnnnnnnnnnnnnnnnnnnnnnnnnnnnnnnnnnnnnnnnnnnnnnnnnnnnnnnnnnnnnnnnnnnnnnnnnnnnnnnnnnnnnnnnnnnnnnnnnnnnnnnnnnnnnnnnnnnnnnnnnnnnnnnnnnnnnnnnnnnnnnnnnnnnnnnnnnnnnnnnnnnnnnnnnnnnnnnnnnnnnnnnnnnnnnnnnnnnnnnnnnnnnnnnnnnnnnnnnnnnnnnnnnnnnnnnnnnnnnnnnnnnnnnnnnnnnnnnnnnnnnnnnnnnnnnnnnnnnnnnnnnnnnnnnnnnnnnnnnnnnnnnnnnnnnnnnnnnnnnnnnnnnnnnnnnnnnnnnnnnnnnnnnnnnnnnnnnnnnnnnnnnnnnnnnnnnnnnnnnnnnnnnnnnnnnnnnnnnnnnnnnnnnnnnnnnnnnnnnnnnnnnnnnnnnnnnnnnnnnnnnnnnnnnnnnnnnnnnnnnnnnnnnnnnnnnnnnnnnnnnnnnnnnnnnnnnnnnnnnnnnnnnnnnnnnnnnnnnnattatcttcaaactattacataataaaaataaataggtgttgtcaattgtgtgaggcatctccaggatttgaaatataaaagaaaataaaatacagcatatcttaatttcttgtcttcacctttcaaaaacaaatttatgtcttcaaactattacataataagagtttataataaagattcatctctaattatgatttatgactcatgttgcggttctaattttataaggaaattgactgcagcataaatcataattcactgcactcaaacaaactcattgatttagattgactgcagttggttattgtcttagccattggatcaaactaataattaaaatcttgcctcatcagtatttttatgattaaaagaaaacacgagacttgctttacaaatttaaaatggaagatacgaaaagcagctgacactgaggtgaggtgaggcgaggtaactattacttaattgtattttctatataaattacatttatatttatatgagacaatttttgttccaattagataaaattattttagtcttatttattttaaacagaattagctttcaactcatattatatatttttatgagtttaatatttatatattgatgcagtcataaattatcataaaatcataaataattgtttgaattattttaaaataattattgtaaaaaattaataaatttatcatatatgataagttgtaattggatgatagtgtataaccttttttttgtttcttatttaaataagttttaagggtaaattttatttataaaaaataataaaaattatctaatttgtaacataaactcttatataataagaaattatgatgaaattcatgttgaattgttttttttcttcttcttcacaattctgcaagttggttggaaggctgtctggttcttgtagacacaagccacgtggtatgctgcttctttcttgggctgaataagggcctcgtgacatcaacctcttaccgcgtgtaacaaagcccgcaacgcgtgagaatgcatcggtccaaaaaattttgcattttcttcttttgaatatcacaataaatatattgaccttgtatataacattttataaaattattttagtctacactgtcttattattcctccttctccaacgaccttcaaatgtaaacccacctaaactaattcttcgttcacatacaataacttgacagtgtcagatttccctaacttgttatttcttatggctatgttcatgttcccttctaacatctaagtattcaaattttttcaatccattatattcgtttatagactatccatcttaattatagcaaatttatttatcatatatatataaattaaaatatagtatgaaaaacttaattttgcattgtcagtacaatataattaaattctttatatatatttgaacataaattatatgcttttttgttcaataaataaaatgaaaacatgctgttcagatatctaaataaactaatatgttttttattaaataaattaaaacataacgtggtttcagatagagtgaaggataaataaaaacatgtggttcagatatcaacattgtattcatgtgtttttgtgagaaaaaacatttcggtcttgttagggctttttcagtcttagcacattgtgttcaaaatgaaacagaggaacagtgaaagatcgacccaatctgaacccttatcaaataaccaggtctataaacaaaacgaacattgaaaccccaatttctttaagtggccttctgacgtcaagctaggtatgacgtttctgtcgtcactcattcgtcattaaaacatttttgcttggttttagaatatctttctggttaaattggagacattactaattattaaaataagtaaatataaaagtgatcgaatctaatttctaccgtaatctatatagtaataaaacaacattttcctaacctatttcttgcttctccttgcttcgcaggttcggttccttacctgcttcttgcttctccttgcttcgcaggttcggttctgcttctctttgcttcggtctcactttttccagcttcggtccactaccacacctctcagccaattccaaatctctgttgggaccctccctcagctttgttctctgcagctctcaacaactctctgaagctatcatcatttcctctcaataactctctcacgaaaacacccaatcccacacttgcttccttctccatcttctgctaacaactctctgaagctatcatcatttcctctcaacaactctctcacgaaaacacccaaccccacacttgcttccttctccatcttctgctatgttttgatttttccttgatcttgctctttctccatcttctcctctctttttgttttttacattgaagctaatggaggctgaaaagccatagctttctcatcg

SEQ ID NO: 2 - DNA, 2515428 bp, Glycine tomentella (residues 1-1,257,714 of 2,515,428)
  misc_feature (2518)..(2998): n is a, c, g, or t
  misc_feature (36286)..(36599): n is a, c, g, or t
  misc_feature (36872)..(36881): n is a, c, g, or t
  misc_feature (65098)..(65189): n is a, c, g, or t
  misc_feature (91979)..(92044): n is a, c, g, or t
  misc_feature (103399)..(103465): n is a, c, g, or t
  misc_feature (108489)..(108498): n is a, c, g, or t
  misc_feature (109073)..(109082): n is a, c, g, or t
  misc_feature (110439)..(110448): n is a, c, g, or t
  misc_feature (114969)..(115015): n is a, c, g, or t
  misc_feature (117523)..(117532): n is a, c, g, or t
  misc_feature (119983)..(120104): n is a, c, g, or t
  misc_feature (147407)..(147539): n is a, c, g, or t
  misc_feature (148147)..(148147): n is a, c, g, or t
  misc_feature (148448)..(148543): n is a, c, g, or t
  misc_feature (151690)..(151746): n is a, c, g, or t
  misc_feature (152026)..(152272): n is a, c, g, or t
  misc_feature (155219)..(155271): n is a, c, g, or t
  misc_feature (160392)..(160454): n is a, c, g, or t
  misc_feature (171648)..(171859): n is a, c, g, or t
  misc_feature (177208)..(177279): n is a, c, g, or t
  misc_feature (178199)..(178208): n is a, c, g, or t
  misc_feature (191490)..(191619): n is a, c, g, or t
  misc_feature (194974)..(194974): n is a, c, g, or t
  misc_feature (196069)..(196069): n is a, c, g, or t
  misc_feature (196368)..(196600): n is a, c, g, or t
  misc_feature (208015)..(208015): n is a, c, g, or t
  misc_feature (212728)..(212812): n is a, c, g, or t
  misc_feature (213179)..(213270): n is a, c, g, or t
  misc_feature (233294)..(233303): n is a, c, g, or t
  misc_feature (252827)..(252827): n is a, c, g, or t
  misc_feature (259658)..(259791): n is a, c, g, or t
  misc_feature (262066)..(262133): n is a, c, g, or t
  misc_feature (262439)..(262704): n is a, c, g, or t
  misc_feature (269209)..(269218): n is a, c, g, or t
  misc_feature (270030)..(270039): n is a, c, g, or t
  misc_feature (270849)..(270858): n is a, c, g, or t
  misc_feature (271823)..(271844): n is a, c, g, or t
  misc_feature (277888)..(277935): n is a, c, g, or t
  misc_feature (278275)..(278284): n is a, c, g, or t
  misc_feature (278614)..(278630): n is a, c, g, or t
  misc_feature (283365)..(283365): n is a, c, g, or t
  misc_feature (292154)..(292154): n is a, c, g, or t
  misc_feature (294898)..(295033): n is a, c, g, or t
  misc_feature (303145)..(303509): n is a, c, g, or t
  misc_feature (327149)..(327149): n is a, c, g, or t
  misc_feature (345182)..(345191): n is a, c, g, or t
  misc_feature (345689)..(345698): n is a, c, g, or t
  misc_feature (347234)..(347243): n is a, c, g, or t
  misc_feature (354646)..(354974): n is a, c, g, or t
  misc_feature (355279)..(355288): n is a, c, g, or t
  misc_feature (366049)..(366049): n is a, c, g, or t
  misc_feature (387264)..(396263): n is a, c, g, or t
  misc_feature (401298)..(401307): n is a, c, g, or t
  misc_feature (404653)..(404702): n is a, c, g, or t
  misc_feature (411793)..(411845): n is a, c, g, or t
  misc_feature (414129)..(414129): n is a, c, g, or t
  misc_feature (424879)..(425053): n is a, c, g, or t
  misc_feature (436381)..(436381): n is a, c, g, or t
  misc_feature (438890)..(439012): n is a, c, g, or t
  misc_feature (445443)..(445813): n is a, c, g, or t
  misc_feature (446434)..(446520): n is a, c, g, or t
  misc_feature (448528)..(448528): n is a, c, g, or t
  misc_feature (449746)..(449755): n is a, c, g, or t
  misc_feature (451579)..(451618): n is a, c, g, or t
  misc_feature (451827)..(453537): n is a, c, g, or t
  misc_feature (453971)..(454045): n is a, c, g, or t
  misc_feature (454682)..(454729): n is a, c, g, or t
  misc_feature (454995)..(455028): n is a, c, g, or t
  misc_feature (458579)..(458801): n is a, c, g, or t
  misc_feature (471895)..(471896): n is a, c, g, or t
  misc_feature (473644)..(473695): n is a, c, g, or t
  misc_feature (475540)..(475549): n is a, c, g, or t
  misc_feature (476056)..(476297): n is a, c, g, or t
  misc_feature (476716)..(481095): n is a, c, g, or t
  misc_feature (483544)..(483583): n is a, c, g, or t
  misc_feature (494682)..(497556): n is a, c, g, or t
  misc_feature (500976)..(501680): n is a, c, g, or t
  misc_feature (509293)..(509775): n is a, c, g, or t
  misc_feature (510125)..(510134): n is a, c, g, or t
  misc_feature (511429)..(511438): n is a, c, g, or t
  misc_feature (512071)..(512080): n is a, c, g, or t
  misc_feature (520829)..(520829): n is a, c, g, or t
  misc_feature (535872)..(535872): n is a, c, g, or t
  misc_feature (548634)..(548716): n is a, c, g, or t
  misc_feature (550234)..(550445): n is a, c, g, or t
  misc_feature (556363)..(556825): n is a, c, g, or t
  misc_feature (561399)..(561399): n is a, c, g, or t
  misc_feature (563228)..(563396): n is a, c, g, or t
  misc_feature (569719)..(569972): n is a, c, g, or t
  misc_feature (571088)..(571199): n is a, c, g, or t
  misc_feature (571558)..(571610): n is a, c, g, or t
  misc_feature (574171)..(574171): n is a, c, g, or t
  misc_feature (582944)..(582946): n is a, c, g, or t
  misc_feature (584002)..(584056): n is a, c, g, or t
  misc_feature (595096)..(595105): n is a, c, g, or t
  misc_feature (598699)..(598791): n is a, c, g, or t
  misc_feature (599080)..(599089): n is a, c, g, or t
  misc_feature (601036)..(601036): n is a, c, g, or t
  misc_feature (603263)..(603301): n is a, c, g, or t
  misc_feature (605068)..(605725): n is a, c, g, or t
  misc_feature (612683)..(612791): n is a, c, g, or t
  misc_feature (613113)..(613122): n is a, c, g, or t
  misc_feature (624207)..(624794): n is a, c, g, or t
  misc_feature (627447)..(636305): n is a, c, g, or t
  misc_feature (637524)..(637692): n is a, c, g, or t
  misc_feature (643932)..(644116): n is a, c, g, or t
  misc_feature (646255)..(646264): n is a, c, g, or t
  misc_feature (655076)..(655353): n is a, c, g, or t
  misc_feature (655764)..(655773): n is a, c, g, or t
  misc_feature (664924)..(665368): n is a, c, g, or t
  misc_feature (665811)..(665897): n is a, c, g, or t
  misc_feature (684898)..(684955): n is a, c, g, or t
  misc_feature (686088)..(686097): n is a, c, g, or t
  misc_feature (686785)..(686794): n is a, c, g, or t
  misc_feature (687013)..(687452): n is a, c, g, or t
  misc_feature (696202)..(696211): n is a, c, g, or t
  misc_feature (697137)..(697146): n is a, c, g, or t
  misc_feature (697505)..(697530): n is a, c, g, or t
  misc_feature (698828)..(699334): n is a, c, g, or t
  misc_feature (700134)..(700134): n is a, c, g, or t
  misc_feature (701663)..(701779): n is a, c, g, or t
  misc_feature (705994)..(706003): n is a, c, g, or t
  misc_feature (706275)..(706284): n is a, c, g, or t
  misc_feature (706554)..(706740): n is a, c, g, or t
  misc_feature (739616)..(739625): n is a, c, g, or t
  misc_feature (739984)..(739993): n is a, c, g, or t
  misc_feature (740772)..(740781): n is a, c, g, or t
  misc_feature (747267)..(747725): n is a, c, g, or t
  misc_feature (748024)..(748033): n is a, c, g, or t
  misc_feature (751823)..(751832): n is a, c, g, or t
  misc_feature (752158)..(752167): n is a, c, g, or t
  misc_feature (754755)..(755332): n is a, c, g, or t
  misc_feature (761790)..(761799): n is a, c, g, or t
  misc_feature (770075)..(773141): n is a, c, g, or t
  misc_feature (781173)..(781238): n is a, c, g, or t
  misc_feature (788556)..(788556): n is a, c, g, or t
  misc_feature (798961)..(799024): n is a, c, g, or t
  misc_feature (799264)..(799264): n is a, c, g, or t
  misc_feature (803059)..(803645): n is a, c, g, or t
  misc_feature (806342)..(806500): n is a, c, g, or t
  misc_feature (807057)..(807057): n is a, c, g, or t
  misc_feature (809594)..(810292): n is a, c, g, or t
  misc_feature (810583)..(810645): n is a, c, g, or t
  misc_feature (819075)..(819099): n is a, c, g, or t
  misc_feature (819525)..(819534): n is a, c, g, or t
  misc_feature (823746)..(823746): n is a, c, g, or t
  misc_feature (831993)..(831993): n is a, c, g, or t
  misc_feature (839444)..(840159): n is a, c, g, or t
  misc_feature (860764)..(860764): n is a, c, g, or t
  misc_feature (874264)..(874670): n is a, c, g, or t
  misc_feature (874982)..(874991): n is a, c, g, or t
  misc_feature (875486)..(875495): n is a, c, g, or t
  misc_feature (880231)..(880231): n is a, c, g, or t
  misc_feature (892030)..(892205): n is a, c, g, or t
  misc_feature (900420)..(900439): n is a, c, g, or t
  misc_feature (905126)..(905135): n is a, c, g, or t
  misc_feature (917837)..(917857): n is a, c, g, or t
  misc_feature (918415)..(918483): n is a, c, g, or t
  misc_feature (919195)..(919698): n is a, c, g, or t
  misc_feature (929819)..(931166): n is a, c, g, or t
  misc_feature (936309)..(936309): n is a, c, g, or t
  misc_feature (937617)..(937679): n is a, c, g, or t
  misc_feature (938166)..(938202): n is a, c, g, or t
  misc_feature (948999)..(948999): n is a, c, g, or t
  misc_feature (955232)..(955301): n is a, c, g, or t
  misc_feature (957017)..(957452): n is a, c, g, or t
  misc_feature (957755)..(957764): n is a, c, g, or t
  misc_feature (963372)..(964799): n is a, c, g, or t
  misc_feature (975972)..(975972): n is a, c, g, or t
  misc_feature (980684)..(980776): n is a, c, g, or t
  misc_feature (984316)..(984467): n is a, c, g, or t
  misc_feature (984667)..(985013): n is a, c, g, or t
  misc_feature (985138)..(985404): n is a, c, g, or t
  misc_feature (985808)..(985808): n is a, c, g, or t
  misc_feature (1017314)..(1017402): n is a, c, g, or t
  misc_feature (1021845)..(1021845): n is a, c, g, or t
  misc_feature (1037120)..(1037214): n is a, c, g, or t
  misc_feature (1041307)..(1042192): n is a, c, g, or t
  misc_feature (1043052)..(1043061): n is a, c, g, or t
  misc_feature (1061729)..(1062991): n is a, c, g, or t
  misc_feature (1064770)..(1065153): n is a, c, g, or t
  misc_feature (1065481)..(1065490): n is a, c, g, or t
  misc_feature (1068350)..(1068358): n is a, c, g, or t
  misc_feature (1070628)..(1070664): n is a, c, g, or t
  misc_feature (1073221)..(1073383): n is a, c, g, or t
  misc_feature (1073735)..(1073744): n is a, c, g, or t
  misc_feature (1082661)..(1082682): n is a, c, g, or t
  misc_feature (1083652)..(1083936): n is a, c, g, or t
  misc_feature (1084301)..(1084344): n is a, c, g, or t
  misc_feature (1084663)..(1084672): n is a, c, g, or t
  misc_feature (1087587)..(1087596): n is a, c, g, or t
  misc_feature (1088480)..(1088489): n is a, c, g, or t
  misc_feature (1100633)..(1100693): n is a, c, g, or t
  misc_feature (1103210)..(1103222): n is a, c, g, or t
  misc_feature (1103976)..(1104499): n is a, c, g, or t
  misc_feature (1108036)..(1108083): n is a, c, g, or t
  misc_feature (1108391)..(1108391): n is a, c, g, or t
  misc_feature (1121455)..(1121455): n is a, c, g, or t
  misc_feature (1131796)..(1131956): n is a, c, g, or t
  misc_feature (1139540)..(1139850): n is a, c, g, or t
  misc_feature (1141715)..(1141715): n is a, c, g, or t
  misc_feature (1153053)..(1153141): n is a, c, g, or t
  misc_feature (1158773)..(1158797): n is a, c, g, or t
  misc_feature (1159432)..(1159557): n is a, c, g, or t
  misc_feature (1162619)..(1162739): n is a, c, g, or t
  misc_feature (1163190)..(1163199): n is a, c, g, or t
  misc_feature (1166327)..(1166327): n is a, c, g, or t
  misc_feature (1171052)..(1171076): n is a, c, g, or t
  misc_feature (1171386)..(1171412): n is a, c, g, or t
  misc_feature (1188088)..(1188121): n is a, c, g, or t
  misc_feature (1188873)..(1188917): n is a, c, g, or t
  misc_feature (1190220)..(1194815): n is a, c, g, or t
  misc_feature (1195112)..(1195121): n is a, c, g, or t
  misc_feature (1210221)..(1210724): n is a, c, g, or t
  misc_feature (1221116)..(1221723): n is a, c, g, or t
  misc_feature (1246582)..(1246600): n is a, c, g, or t
  misc_feature (1247090)..(1247160): n is a, c, g, or t
  misc_feature (1252322)..(1252399): n is a, c, g, or t
  misc_feature (1255587)..(1255722): n is a, c, g, or t
  misc_feature (1256438)..(1256447): n is a, c, g, or t
  misc_feature (1264054)..(1264141): n is a, c, g, or t
  misc_feature (1264542)..(1264551): n is a, c, g, or t
  misc_feature (1265445)..(1265445): n is a, c, g, or t
  misc_feature (1270155)..(1270164): n is a, c, g, or t
  misc_feature (1270726)..(1270735): n is a, c, g, or t
  misc_feature (1276069)..(1276088): n is a, c, g, or t
  misc_feature (1285115)..(1285115): n is a, c, g, or t
  misc_feature (1292752)..(1292761): n is a, c, g, or t
  misc_feature (1293343)..(1293352): n is a, c, g, or t
  misc_feature (1296972)..(1296981): n is a, c, g, or t
  misc_feature (1297588)..(1297597): n is a, c, g, or t
  misc_feature (1301879)..(1301888): n is a, c, g, or t
  misc_feature (1302658)..(1302667): n is a, c, g, or t
  misc_feature (1315014)..(1315160): n is a, c, g, or t
  misc_feature (1318709)..(1318990): n is a, c, g, or t
  misc_feature (1319334)..(1319757): n is a, c, g, or t
  misc_feature (1321767)..(1321837): n is a, c, g, or t
  misc_feature (1324303)..(1324656): n is a, c, g, or t
  misc_feature (1327754)..(1327769): n is a, c, g, or t
  misc_feature (1348460)..(1348627): n is a, c, g, or t
  misc_feature (1353754)..(1354201): n is a, c, g, or t
  misc_feature (1354501)..(1354543): n is a, c, g, or t
  misc_feature (1361377)..(1370010): n is a, c, g, or t
  misc_feature (1373811)..(1374519): n is a, c, g, or t
  misc_feature (1404036)..(1404553): n is a, c, g, or t
  misc_feature (1408650)..(1408745): n is a, c, g, or t
  misc_feature (1413613)..(1413642): n is a, c, g, or t
  misc_feature (1418003)..(1418003): n is a, c, g, or t
  misc_feature (1422061)..(1422070): n is a, c, g, or t
  misc_feature (1435965)..(1435974): n is a, c, g, or t
  misc_feature (1436939)..(1436939): n is a, c, g, or t
  misc_feature (1442212)..(1442221): n is a, c, g, or t
  misc_feature (1466149)..(1466756): n is a, c, g, or t
  misc_feature (1488168)..(1488729): n is a, c, g, or t
  misc_feature (1489174)..(1489183): n is a, c, g, or t
  misc_feature (1494640)..(1494771): n is a, c, g, or t
  misc_feature (1495169)..(1495178): n is a, c, g, or t
  misc_feature (1496562)..(1497374): n is a, c, g, or t
  misc_feature (1501256)..(1501256): n is a, c, g, or t
  misc_feature (1519233)..(1519331): n is a, c, g, or t
  misc_feature (1530876)..(1531672): n is a, c, g, or t
  misc_feature (1539501)..(1539510): n is a, c, g, or t
  misc_feature (1550168)..(1550188): n is a, c, g, or t
  misc_feature (1559883)..(1559892): n is a, c, g, or t
  misc_feature (1560261)..(1560270): n is a, c, g, or t
  misc_feature (1560602)..(1560695): n is a, c, g, or t
  misc_feature (1568183)..(1568192): n is a, c, g, or t
  misc_feature (1575847)..(1575847): n is a, c, g, or t
  misc_feature (1580103)..(1580103): n is a, c, g, or t
  misc_feature (1581680)..(1581790): n is a, c, g, or t
  misc_feature (1582461)..(1582543): n is a, c, g, or t
  misc_feature (1598249)..(1598481): n is a, c, g, or t
  misc_feature (1615304)..(1615306): n is a, c, g, or t
  misc_feature (1620936)..(1620976): n is a, c, g, or t
  misc_feature (1622376)..(1622440): n is a, c, g, or t
  misc_feature (1623858)..(1626107): n is a, c, g, or t
  misc_feature (1639782)..(1639810): n is a, c, g, or t
  misc_feature (1657914)..(1657978): n is a, c, g, or t
  misc_feature (1658123)..(1658961): n is a, c, g, or t
  misc_feature (1662215)..(1662290): n is a, c, g, or t
  misc_feature (1662660)..(1662669): n is a, c, g, or t
  misc_feature (1666740)..(1666813): n is a, c, g, or t
  misc_feature (1671811)..(1672574): n is a, c, g, or t
  misc_feature (1673048)..(1673065): n is a, c, g, or t
  misc_feature (1674791)..(1674800): n is a, c, g, or t
  misc_feature (1675163)..(1675172): n is a, c, g, or t
  misc_feature (1678279)..(1678404): n is a, c, g, or t
  misc_feature (1678859)..(1678899): n is a, c, g, or t
  misc_feature (1684450)..(1685029): n is a, c, g, or t
  misc_feature (1690393)..(1691192): n is a, c, g, or t
  misc_feature (1698905)..(1698905): n is a, c, g, or t
  misc_feature (1713749)..(1713758): n is a, c, g, or t
  misc_feature (1714429)..(1714438): n is a, c, g, or t
  misc_feature (1721212)..(1721719): n is a, c, g, or t
  misc_feature (1722067)..(1722269): n is a, c, g, or t
  misc_feature (1733874)..(1733908): n is a, c, g, or t
  misc_feature (1743304)..(1743899): n is a, c, g, or t
  misc_feature (1744231)..(1744265): n is a, c, g, or t
  misc_feature (1748110)..(1748890): n is a, c, g, or t
  misc_feature (1759134)..(1759143): n is a, c, g, or t
  misc_feature (1762830)..(1762889): n is a, c, g, or t
  misc_feature (1771366)..(1771373): n is a, c, g, or t
  misc_feature (1775112)..(1775509): n is a, c, g, or t
  misc_feature (1782687)..(1783942): n is a, c, g, or t
  misc_feature (1792376)..(1792451): n is a, c, g, or t
  misc_feature (1802175)..(1802222): n is a, c, g, or t
  misc_feature (1803101)..(1803115): n is a, c, g, or t
  misc_feature (1804607)..(1804627): n is a, c, g, or t
  misc_feature (1807679)..(1807679): n is a, c, g, or t
  misc_feature (1815540)..(1816276): n is a, c, g, or t
  misc_feature (1816730)..(1816739): n is a, c, g, or t
  misc_feature (1831257)..(1831321): n is a, c, g, or t
  misc_feature (1840114)..(1840183): n is a, c, g, or t
  misc_feature (1841183)..(1841192): n is a, c, g, or t
  misc_feature (1853078)..(1853247): n is a, c, g, or t
  misc_feature (1866798)..(1866807): n is a, c, g, or t
  misc_feature (1867100)..(1867109): n is a, c, g, or t
  misc_feature (1867744)..(1867800): n is a, c, g, or t
  misc_feature (1868124)..(1868163): n is a, c, g, or t
  misc_feature (1872772)..(1872781): n is a, c, g, or t
  misc_feature (1876847)..(1877364): n is a, c, g, or t
  misc_feature (1880122)..(1880122): n is a, c, g, or t
  misc_feature (1885134)..(1888261): n is a, c, g, or t
  misc_feature (1908210)..(1908210): n is a, c, g, or t
  misc_feature (1917391)..(1917806): n is a, c, g, or t
  misc_feature (1938336)..(1943444): n is a, c, g, or t
  misc_feature (1943733)..(1943742): n is a, c, g, or t
  misc_feature (1965086)..(1965095): n is a, c, g, or t
  misc_feature (1965460)..(1965469): n is a, c, g, or t
  misc_feature (1972085)..(1972791): n is a, c, g, or t
  misc_feature (1973111)..(1973122): n is a, c, g, or t
  misc_feature (1974857)..(1974935): n is a, c, g, or t
  misc_feature (1975220)..(1976196): n is a, c, g, or t
  misc_feature (1977813)..(1977865): n is a, c, g, or t
  misc_feature (1978144)..(1978215): n is a, c, g, or t
  misc_feature (1988350)..(1988667): n is a, c, g, or t
  misc_feature (1992044)..(1992053): n is a, c, g, or t
  misc_feature (1992564)..(1992575): n is a, c, g, or t
  misc_feature (1993922)..(1993931): n is a, c, g, or t
  misc_feature (1998316)..(2001666): n is a, c, g, or t
  misc_feature (2007006)..(2007034): n is a, c, g, or t
  misc_feature (2022891)..(2022963): n is a, c, g, or t
  misc_feature (2023545)..(2023545): n is a, c, g, or t
  misc_feature (2030200)..(2030333): n is a, c, g, or t
  misc_feature (2033148)..(2033157): n is a, c, g, or t
  misc_feature (2033672)..(2034130): n is a, c, g, or t
  misc_feature (2040204)..(2040649): n is a, c, g, or t
  misc_feature (2040932)..(2040941): n is a, c, g, or t
  misc_feature (2043444)..(2043444): n is a, c, g, or t
  misc_feature (2044607)..(2044616): n is a, c, g, or t
  misc_feature (2044965)..(2044965): n is a, c, g, or t
  misc_feature (2045720)..(2046417): n is a, c, g, or t
  misc_feature (2048728)..(2048737): n is a, c, g, or t
  misc_feature (2054225)..(2054315): n is a, c, g, or t
  misc_feature (2055747)..(2056110): n is a, c, g, or t
  misc_feature (2060336)..(2062932): n is a, c, g, or t
  misc_feature (2064549)..(2068059): n is a, c, g, or t
  misc_feature (2071944)..(2074388): n is a, c, g, or t
  misc_feature (2077276)..(2077285): n is a, c, g, or t
  misc_feature (2077776)..(2077785): n is a, c, g, or t
  misc_feature (2079822)..(2079963): n is a, c, g, or t
  misc_feature (2099994)..(2100087): n is a, c, g, or t
  misc_feature (2101621)..(2101621): n is a, c, g, or t
  misc_feature (2111187)..(2111214): n is a, c, g, or t
  misc_feature (2128572)..(2129569): n is a, c, g, or t
  misc_feature (2129891)..(2129900): n is a, c, g, or t
  misc_feature (2136592)..(2136865): n is a, c, g, or t
  misc_feature (2137405)..(2137414): n is a, c, g, or t
  misc_feature (2142352)..(2142967): n is a, c, g, or t
  misc_feature (2152571)..(2152611): n is a, c, g, or t
  misc_feature (2162035)..(2162044): n is a, c, g, or t
  misc_feature (2162420)..(2162429): n is a, c, g, or t
  misc_feature (2168678)..(2168687): n is a, c, g, or t
  misc_feature (2168965)..(2168974): n is a, c, g, or t
  misc_feature (2170448)..(2170528): n is a, c, g, or t
  misc_feature (2172418)..(2172450): n is a, c, g, or t
  misc_feature (2175858)..(2176004): n is a, c, g, or t
  misc_feature (2176822)..(2178287): n is a, c, g, or t
  misc_feature (2183532)..(2183533): n is a, c, g, or t
  misc_feature (2192827)..(2192836): n is a, c, g, or t
  misc_feature (2193136)..(2193193): n is a, c, g, or t
  misc_feature (2226691)..(2226701): n is a, c, g, or t
  misc_feature (2228677)..(2228844): n is a, c, g, or t
  misc_feature (2230490)..(2230490): n is a, c, g, or t
  misc_feature (2236754)..(2236902): n is a, c, g, or t
  misc_feature (2237173)..(2237182): n is a, c, g, or t
  misc_feature (2242420)..(2242420): n is a, c, g, or t
  misc_feature (2244111)..(2245118): n is a, c, g, or t
  misc_feature (2258246)..(2258284): n is a, c, g, or t
  misc_feature (2262189)..(2262198): n is a, c, g, or t
  misc_feature (2262472)..(2262481): n is a, c, g, or t
  misc_feature (2266513)..(2266701): n is a, c, g, or t
  misc_feature (2272669)..(2272678): n is a, c, g, or t
  misc_feature (2298575)..(2298993): n is a, c, g, or t
  misc_feature (2299347)..(2299359): n is a, c, g, or t
  misc_feature (2307329)..(2307440): n is a, c, g, or t
  misc_feature (2307847)..(2307856): n is a, c, g, or t
  misc_feature (2308269)..(2308278): n is a, c, g, or t
  misc_feature (2323624)..(2324477): n is a, c, g, or t
  misc_feature (2335007)..(2335040): n is a, c, g, or t
  misc_feature (2350282)..(2350318): n is a, c, g, or t
  misc_feature (2369126)..(2369670): n is a, c, g, or t
  misc_feature (2381400)..(2381716): n is a, c, g, or t
  misc_feature (2392901)..(2392930): n is a, c, g, or t
  misc_feature (2402695)..(2402695): n is a, c, g, or t
  misc_feature (2411490)..(2411775): n is a, c, g, or t
  misc_feature (2431281)..(2435739): n is a, c, g, or t
  misc_feature (2445436)..(2449828): n is a, c, g, or t
  misc_feature (2452416)..(2455423): n is a, c, g, or t
  misc_feature (2461739)..(2461937): n is a, c, g, or t
  misc_feature (2466912)..(2466921): n is a, c, g, or t
  misc_feature (2473868)..(2473868): n is a, c, g, or t
  misc_feature (2476490)..(2476490): n is a, c, g, or t
  misc_feature (2486351)..(2489785): n is a, c, g, or t
  misc_feature (2490307)..(2490316): n is a, c, g, or t
  misc_feature (2494031)..(2494157): n is a, c, g, or t
  misc_feature (2496343)..(2497092): n is a, c, g, or t
  misc_feature (2504781)..(2504819): n is a, c, g, or t
  misc_feature (2513626)..(2513666): n is a, c, g, or t
  misc_feature (2514241)..(2514535): n is a, c, g, or t
  misc_feature (2515079)..(2515133): n is a, c, g, or t
agtttttcaatcagttgtacttcaatttctacctccggaagctcgcagcattatgcagcagcaacaacaactggtcgaagaacaacaccaacaacatgatcaaccacatgatgcacagcaacaaaacaatgatgaaccagcaaatgaccaacaaggagaggatgacaatgactatgttgattattgacttccaaacagtttatcagttatcaaatgtttaacattgcggtattatgttatttatatttggaacttattttcgtttgtttaaacatttgactttgaatgtatgaattcagttttttattttataatatgctttattttggtaatcatgttatttaatatcaataaataaataatctacggaaattactaactcaatgagcggtaggtaagttttcgacggaataggccgtcggaagtttccgacggaattggccgtcggaagtttccgacggaattggccgtcggaaatttccgacggaaatggccgtcggaaatttcccacggaattggccgtcggaaatttcccacggaattggccgtcggaaagtttccgacggaattggccgtcggaaatttcccacggaattggccgtcggaaattttccacggaataggccgtgggaaatttccgacggaattggccgtcggaaatttcccacggaataggccgtcggaaatttccgacagaataggccgtcggaaatttcccacggaaatggccgtcggaaatttccgacggaataggccgtcggcaaacgccgtcggaaatttccgacggccaaaaaatccgtcggaaatatttgcaacgaccgtttttccgacggatttttttccgtcggaaatccgtcggaaatctcgaatttccgacggatttttgatatttccgacggatttcggccgtcggaaatagcttttttttttgtagtgtttgcttccttaaaaggatttgtttccaccaaactagatccccgctggtcggtgcttaacatcttgaagcaatttgtggatgacagttcaaatctagtttatgcgaatgctggatttgttatcaaatttacttttttttttcttctttcatttcagataagcagctgtaaagacgttatttacgtataaatctgttaagaaatagaatttcatgcattatatataatttacttgaaggaatagggaccacgagaaatagaacaactaactaatatttagttaaaacatattaaaaaggctttcaatattattattttaaaaaataagcaatcttaagaatgattgtactaaaattgctttgagggaaattaattataaatactagttactaaccatcatttcccaaatgtaaataagagattaatttctttttcctttagatagttgacttagaaaagtcattaaattccatcggagaataactcacttgtactgttcaaaatttcataccaacatatgcacatgataacccccttgatatgtggggaatattgaagagggataaaagtaataaatattacttcgttagcttatgaaagacattaccaactcagctaagtaataaattcaaataggctattaaatattaatcattcattttaagtatataattaaaattggtagaaaaaaattatgaataaataaaatagaaaaaagacagtagttttttcctagtcgtttgagtaaaagtgaagcaataatttatgttgctaagttcgtaagaagaagtcagagggatgctaacaattgacaacaatcatatttatattctacttcatctttacctttttttcttttttctcgttttacacccaaaaacgtggttatcaattttcatcaattgattcggatttgtggaatggcacagtagagaagagatgctagttgaataggatccttcggtgtaatatgtggctgtggatctagctttttgtccactttggattatcagagtggtgataatgattttgcctcagacttgaggataagaatgaattaaatttgtgataaatctttacgacattcccttcacttcgaataggacgtattcacgatcggtggctttttattccgacggtacaaatttgtggttagataatcagaataattaatagttttattagtattcaatcagtataatttttatattatattattaatgtaatacattctcttattaacgtaaactcacaataattagattctttgtaaaagcataaaattgttataactagtaagatggttatttttgtaacattttttttataaattatattttaaaataatttttaattagttgataatataaaattttattccattaatgaataaaaattaactccaatgttggaaactatgtcgtaacagttatactctaacagaaattaatcgatagaatgctaataaatgttacatttttattgcaaagttttcaagttagtgcttcttaaattgttattaacacaaacttttcttctttattctcgtagcaatttaagttaatttcgtgttaattgatagnnnnnnnnnnnnnnnnnnnnnnnnnnnnnnnnnnnnnnnnnnnnnnnnnnnnnnnnnnnnnnnnnnnnnnnnnnnnnnnnnnnnnnnnnnnnnnnnnnnnnnnnnnnnnnnnnnnnnnnnnnnnnnnnnnnnnnnnnnnnnnnnnnnnnnnnnnnnnnnnnnnnnnnnnnnnnnnnnnnnnnnnnnnnnnnnnnnnnnnnnnnnnnnnnnnnnnnnnnnnnnnnnnnnnnnnnnnnnnnnnnnnnnnnnnnnnnnnnnnnnnnnnnnnnnnnnnnnnnnnnnnnnnnnnnnnnnnnnnnnnnnnnnnnnnnnnnnnnnnnnnnnnnnnnnnnnnnnnnnnnnnnnnnnnnnnnnnnnnnnnnnnnnnnnnnnnnnnnnnnnnnnnnnnnnnnnnnnnnnnnnnnnnnnnnnnnnnnnnnnnnnnnnnnnnnnnnnnnnnnnnnnnnnnnnnnnnnnnnnnnnnnnnnnnnnnnnnnnnnnnatttaatttttgttaaaaataaatttttactatattttatttattttttaatcaaattcggattagacaaaatattttttctttattgaattagaggattaagataaaaaatatttaatatttgattatgtttttagcatgattaccttgtaaaataagatatgtgtggaaaataaaatattaaataattttaaggtagtgtatgccaaattcaccttatgtattaaataatttagttaattattttaggtgcagacgtaagatgtgcaaagtgtacatctccttagtgcttcagtacaaatttaatttggttttttattttaaatttagagcaaaatacatattatatctataaaataattatttatcatccagcgcatgaaacaattaattcataattaatataaatataaaaattacgaagtgtgaggataataacaagttcctggaaggccattagtccattatgccattacagagtccagataacagccttttacgacttctcgttatgatcgtatctattgttcggcccgtgttttcaaaacaaggacagaactcgcggaaagagcccacaagaatgactttgcatacatcaccttgatcactcgtttgatagtggatactattaatacactaatttttactattagagtactataattttgcatattattttaaaaatttattagtttaaggtatttttattatgaaattttgtcattaaatttttttgtcatgtgcgttgcacttctttaggtacaaagacacaacatataaataaaatttggcgaactaattttgcttttgcaataaaatgtcataggtaaacattataaaaatcttaatcattggattaatagccacgtgattgagaatttgagattgtttgctggatgtccaaatttttatcgtatatctaattttaaaccatttgattaaaagacataaactgttattatatgttgattgttgttagtaatcatttgtatctctatgtttaactattaaataaacttatatccaattaaataattatgtttgtgattgtgtgatcatgctcttagatattacttatgttggtactattatatcccgtagaatattattattgtgcctattaattaatctctaatgcatgttcatcaatcatcattcatttagatattacttgtgttggtattattatatccggtagaatattggtattattttacctattcatccttaatgtctatccatgatatatttagatgcatgtgctggccgggccattgcttgaccaaaaataatgtagatgtgtctcgcatcagctccaattccaattggttgtgatttgatttttctgaggaaaagaaatcgaataattgtagttttaaaaaaaatccatgtctaaccctcgaatttggtatttattttcattttaattcctgaatttaataaaaaatactaatcatctatgaatttatattccacttattacactgaatactcaataaaaaaaatgtcatttatcacattaattgaacccctaatatgtctttgttaaatttactaaaaaatacgtgacacaagtttcagagactaaaggcaacaacatgttaaaatgagcaccaacttgagatgttgatggtcacattgctcttaaagatatatccatgttacgcgtaaatcatccaagattttacaggatcttctagactacaaaattgggaaattagaattggcaagcaaaaaacttaaagaaacccagaaagagatgtagaaaatagactcattggtgtgggaaaaaagaagctggaagttaagagagccgttttaatggttaaaatttgtcagactatttctggtgtaacaaaattgacataatatgtaacgtgaattaaccttcaccaaaaaaaacttaactaacttaatcaaacattaattaatatatttaaacaagtaataaatacaattaaaatatgacattaatgtcttcaaaaatggaaattatcccaggtttaaaatgagtcagaaattctcgtatttctatacaagctttcaattcagaatatttattgtaatggttatttaattttaatttttgttatatatgataaattattatgaattttctagatgttggataaacttaatatattaattttaaaagaataatttaatatatatgataaactatcatcattgtcatcatgacttccattatgatcgttattataaccaccgtcatcatcatcaatatgactttcaccactgtggtgacgatagttaacgatcatggtggtggttgcggtggcaaccattatagttatggtgaaaacgatcatgacggtgatggtaattgtggtgacgatcatgacagtcatggtggaaattgttatgacggtggtggttgtcatggtgataatcgatttgagatattttaggatgtcatagattaaatctttaaatatttgattttctatttgataaatcttataaagaattaatgattaaatgaaattttaattagaatttaaaatattttaatcttaatcttttactttaatctaataattgagattaatcattctcattttactattcttatgtgatacgttttatatatgtgtgtgttttattataaatacaataccaacttagttttagttaattcctttataatttaagtttcagtttgtagttcctatcttgttaaaagagtaaccatgcaagtctataattctgcgttcattacgtgttgatacgttacaacttacaattagctgaaaattcacatgtatagctactgtgaatttataaagtaaggcatcagaaaaaaaaaaaaacaatagggcaattttctaatacatgatataaaatatattaagtaatgaatattacataattatatacagtataaacttttaaatgttcggccctttttctagtgggctccaaactagggcagcagccagcagggccgggcctaacctaagtaatatcttcactgatagtatatatagttcaaacatttaaagtgtccaacgttctattatgcgtagtatatttaagaagctactagtatataaactcaaatatccatttaggtaaactaccattaccatgtagaagtatagtagcttttacaaataaatgatcctgaacattaaatggagaggagaagaccacccacctttcccacttcacagaacgacaactgtgccagcattcattatagagagagacgtagtactacagtacttgagatcgatcataataaacactcaaacccaaggaagcaaaactaaactaaccaatgaagttgaagcagcagaaaatgagagtagtagtaggctcagtgtggctgtgcctctttctgttggctgtcggggagtcggagggagcggatttggcggcgaagtgcaacctgctggttcagaaagtgctgccgtgcctaaacttcgcgacggggcaggcggcggttccgaccaaggactgctgcgaggcgacgtcggagataaagaagagcgacccggagtgcctgtgcttcgcgatccaacagactcacaagggtagtccgcaggtgaaaaacatgggcatacaagagggtaggctgcttcagctgccttctgcttgtaacttgaagaatgccagcaccaccaactgtcctagtatgttcatcccaccataactcactactcctctttaactttaataattaccagctaatatatctttattaatccaaaaatgttaatcactaaccttagaatattggttaaaaaacttaaaaagaaaatgttttttatttttattcataattgtttttacagtcttataatttttacaataaatattttttaaattttttttaactaaccatatccttattaatgagtacttcattcacttgccaaatactagctcacactccaaatctaaattactgatcataaaaagaaccgagtcacttaataattagcacatgtccaactttattggagaatttattgtatgatccaagtaaccatgatttcatcaattaacctatttcaccagctgatattatgtatttgaattttgttatttttataaattgaaaaacttaattgcataccaattgaaatcgatagaaaccattatcacggtagttcagattacatatatagtaattgatctcctattctgaccttcaaacgaaaaaagacacttaaaagatgaagtttgagtttgacttaaaaacaaatattaaaaaatcctaaaaatattattaattactatttttacattaatgtgattgactaaccggaagaaatattataaataaatttagaaatcaattgtacattcaccaaaaagaaaatacacatgtctacttttctaaaaaatataaaatttaatttttccaaacattatgttgtaatttttttattgttaaaataaaagaacttatgattaagtttttatcttcaaataatgaaaatgggacacatttgatttgatggcagagcttctgggtctatctccaaactcccctgacgctgctatcttcagaaatgcttcgttgaaaaccaattcagcttcaacagtgggaacaacaccaccagtctcagacgacatccacaagggctctaatggaaacatgcttagacctgttctcgttgcagacctaatagctgttgtttgggccattctcctcgtcgtgattccaatcggttctgtcaacatttattcgtgatgggtgcgttcaattaatgactcatgcagtaacagataggcaccactttaaatgaaagtagccgtggtagttgttttgctagtgatggatggatggattttaattagtttgcaggttgcagcatatatagaattaattgatttgcgtctgcaacatgttgttatgttgtctagaatatttcgaccctcttcatgttgtctttattaattaataattatcttaatttgtatggacttcttttccacatgctagactatatatctgatagattattaaaaaagtagtggttcattattaagattttgtttggataaaagttactaagtacagagcttttctacttaaaaatataaaaaaatttcaatagaaaaactattaaaaatatttctaattttatatccaaatagacttcaaaagtatgttttaatttgttttagattgtacatttcgaactgccttatgttatgcttatcgtcggtcacttactcgttagtttttatatctatagtaaatttctattatgttgtctatctaatatctaatacttatctattttactatatgaatatatttactattatctatctatatctactcctccatgtaattattcccaccatccagctattaaagacagataggagtaactcctgcactatttaacgcgtactggataagctttgtcatttagtaactattgttttgtgggatcatgggatgaacttttggtgatagattttattttttctaacattaaaagtatattagaataatagactacagcatttgtaaaatattaattgctacgtggaatagacttttgatgttaggttttcttcttctaacatatggagtatattagaataatattttatttattaatatctcatacaaacatttacataaatttacaattatattttaattttttttataaaagtaattttatgaaaaataattattttaaatgcaattaatattttttctatgaaagtgtgtattatattaaaataatatattttaaggagatataaaaaattatttctatcaattaaaaattttcagttacaaaattataaaataactaaattaacaagttttattattccaccaataaagaagtttattaaagtattgatttcaaatcaaattaattataatgtcaaacaaactttatttataacatttataagtctcaaaaatattttaaataataaaaatttatactgtcatgaaaaattatttcagtataatcttgttaaaaataattattatgaaagtcaataactttcaatacattacaatattcaattaaatgataatgtaaagaatctttactctagcgcatttttttaagttattaaaaaattaaatattctgtataaaataaaaaacgtaaactccactttttaaaagtgatcaattatgtctctttacatagactaatcctaatagatacttcatattaaatagcataattatcccaaaaaaattatccaatcttatttcctaattcagctcccctcagcattatactaacacaccaataggatagataataataggggtgtcctcggtccgtatggatggattgttcataaaaaaagtcacccaaaccaaaattataattttgatttagttttcatttaaaataaaattcaaattaaaccaaaccaatattttacaatttggttcaatttgattttttactaaaatattatttcattaaaatttatatacgttattttcatcttttaaattaaactacattaaaaaattactgataaaaatttatgaaacttattaatatataaaatcttctataataaaaatctatcaaattttcatccattttaaatcaaacaaagatcatctaaaaaagaaaatgatatacataacaaatagtaatataaataataattaaattgttgcgatttgatttgatttaaaaaaatataaataacaatccaaatcaaattgattagcctgaggaaaaaactattcaatcaaattcaaaaagaatcaatttggttcaattttttatttttattttgaatcgatttgatatgaaccacccctaaataataggaaatactaataactataatttactaattaaaaaaagtaaataatttattctaccaccaaacagaccttagtgtaataatctgcaaatattaccgtacgagatattgagactaaactcattatgtgaacccatacacaagacccaatatattatcgcttttgaccttaataacaatatgccccacaatattggtgaacagtgactttatttgaacttgacgaaattaacaatgtgccctaatcaatgttaacattcaacaaaccaggattttatacaatatgaattaggcaagttgacattaaaatttaaaatccaatgaatggtaaacacgctagttaacaacttaacccaaataattaaattatgacgagcacataaataaatttttggctaaactagccagcttgttcccattacttttggtctacatgacttagtttagacggcatacacgaaaattgcattcaaaatcaagcgaagaataccaagctaaccagaaaatccacaaaacttgaagcacggaccacgaagaaaacaaaaggaaccaaaaagaaaaaaaagaaaaaagttacaataggaaactttcttcaacattcaagtagattcacgaaatggtttgcttgaaaacttagcgggggtgccttttatacagcaccatctgatggcagtgtgctctgaatatttgaaggcataaggatgttgaatccatctgcagcagtagaaacaatcattccaggaatctgcgcgtgccaatgtagttccttcaggtctttttgtccctgttttaattcaaggcaaaataaacgaatgaacacaattaatcagggagtcttattctaacattcagataaatagagcggaggagcatttggatatacctggtgaataaacaatagttggggaggcaaatcttcaggagcattaacttgttctttggttttagctttaaattcagcctcctcttcctcatccttttctaaagaaaggtcccatatactgtggagaaaggtacaaaacttgtcaaatctcaaatacataaataacaaataaaaaaggagcagtggtgctatgaagctcatgcgcatgtagattctggggaagggttagccaaaaaaaaaaaaatcccgacaaggctacaactagcgatgcaaagagttaattataaaataacagcagtcctttacgctcatgtgaatcctttttcactatttggatcagaagatgccataaagttcagtgtcatgtagtaatgtaaagatcgaccttttaccactaaatctctcttaacagtataaaagcaaaaaataattcagcagataatgctatcaaaaccctttacttacgtaagctgattatcagatgaagaaactgccaatgaagaggcttcatgaggactccactcaatggatgtgattgagtgcttgtgatattcgaaatgcgctaccacagaatctccttcctgcccacttgtcatatcagctttaataacaagtaaattaataagcaggaaaaaatagacaatgtgaagttactttctaaatcataataatgcaataatactataatagttcttcaccataatgcatctagaagttccttcatacatggatttataggcacttgatttgcacatgaatggtaaaagaaagatgtgataatgaaacaagggaaaagaaagtcatcagacagctttacaaattcaatgtaatatgcctactgggacaacaggaaaaaagaatgataaaaaaattgaagctggatatgacataatttgaaacaccattgacagaacatcacatgcacacagtaacctccctgttataaatgaagcatgtttactattgttttattctttacgaagtcaacttataccttgagcagtctgagatcacgaatagaaatagtcccatcatcactccctgaggccaacatacaactagccaacctgctcagtataatatagaacaaagtgatgaagagatctataatagcagttgatggaacaccatagaattaatgtattaatacctgttccatgacattacattcacatcagcattatgtgccttaaaagatgcagctggtgacttccccaaacgggtatcccatattgcaatgtttccatccacagaacaagaagcaaaaacgtcaggttctatagggctccactgcagggattaattgaacattaaaaatctaattagatttataaataaggataaactagtaaaattagagtgtaaggaacaaaatatactatactgaaactacaagaagagcaactactgctttgcatatgagtaaacatacttgcagatcttcaacactagcggtatgtccagcaaatggagcattatcaacattccacgttccagcagatgtaggctcccacagataaatgcaattattgcaatccccttcaaaaatgaagatcattgtcaagctttatatatctgtgataactaagtatggagacatgccaggggaagacatagctaagaataaaaaactatgtaccccaatacctagaggctcctcgctatgcgaaggtaagggggaggaatattatacgcagccttacccttgcatatacaaagaagctgttttcggattcgaactcattacaacaggtcaccaaggcacaactttaccgctatgccaaggctcgccctcagggggaagacatagctaaactgaaaaaaatataactaaagattaccagatgcaagccttccagtaacaagaggactccagtctatagcataaccttcatctttgtgtttaaatttatacaatgggtcctgattaaaaattgcagcaactccttggacaccttctgtttcagtctcagctagagcatttaggtgagagttgaggtcccagacctacaaattgattctcaagtatcagactgtatagtgtatactaaatagaaggcatggcttaaaacagtatttaactttgattgaaatagaagatggagaaaaatacactccacattgtttaaccttaactgctgctaattatttaagaatttaaagaaatttaaatgttacaatgcttagaaccaggtaaccacatctgtatctaagagtaaactatacctgagctacaatttatcatatctaatcctaatagttactcatttgaagtttatctgaagtattgtcgcccaaactgttacagagccaaagaaagaggcctgcagtcctaattaatttattcaacaaacactaaacaaacttaaccttatttgaaaaaaaaataataataatttatgaagtcaagccaaagttttacgaatccatttgtttcaaatttaaagtctgcaatgtgtaagagtcctggcacagctgtagagttgtgccttggtgacttgttggtcatgagttcgaattcagaaacaggctctttctatatgcaagggtaaggctgcgtacaatattcctcccccttaccttcgcatagcgaggagcctctagacaatgaggtacatagttttttttagtaatgtgtaagagcataataataaccaatacagtaaaagcttgccaccacaatcatgtatttaaatattttccaccccattttatggacactttgatcttacagattctgtcatccgctaacctccagtcacatacagtaaaaaataaatagatttttgtctttttttgttatataaaatcataatctcccaatcctagtaaaaataaatagatttttgtcttttttgtcaaattagaaaactaaatcaaatggttgaaaagtctgacctgtacatgaccagtatcggcccaagctgcacatatatggggattttgtggcatagagcgtatacggttgacacatccttggtgagcaaccttccgcaactgtagatgcaaaaagaatcaaaatgttagtaacatcaaatttgaagcagtcaagaaatgaaacaataaaaacttaaatgaagaggaagttgcctgcaaactgggaccctgagcaccaccttcttcttcatcctcactatcatcgtcactgtcactatcctcaccatccatttcagtgtcatcagttccaagtttaggcaccggctcacgtctctttccagtaatatttgatactttaaaaattccaatagaattccaagaaggtttctctgcctgtggcacatgcacatgcattgccataacatgactttgttgatcaaaagaagtagaatggagaaaaacaaaggaagcaaagcaagtggacaacataactatgagctgctgggtgttaacttttcttgagataattaccagttataataaataaaaaaaggaaagaaatttatattcaagactcaaaatccctttaaagggaactttctctagtgaatatttgtctacaaagcctaatattcgttaccatttttctcatgaaaccactaaccacctccgatttgattaatgaaacatcctcaaacaaatatatatatatatatatatatatatatatatatatatatatatgaaacaacactgacctgagtccctgccacgaaatatactgtgtggggaaattcttttcgaaccaagcccaaagagtcacgtaaaatatcaaagctgtcaaaagccccaaaatgtatttataataacttgaagattactgatactaagcagaaataaagcaagttcccaataaaggtggctaagattctccactgaattgcaatgccaatgccaaaggaacttcacataacaacatatgatcctatcattattaataataacaataccagctaaaacaaacaggtttgtttatcaaaaaagctcaaagttttgctctctttcctctttctgtggagccaaatagaaaaacagaaaacaaatgaaaagaacaaaaaaggccatgaatgaaaatacctcaaacatggccatccaatgtgaaaggcatgaagagaattgtaagcagaaggatcacactgaagctcttcaccttcctccaacttatccacacccggttgccacaccttcgctgggatttctggcgccaaagatgaagaagacccaccctctttcttcgagccctgaatttttttttgcccacaaatttaaacaaaattttatataaaaaaaatgagaggtgccaacaaaagaccataatgaagtgaggttattataatagaaaacattgaaaagggtacgagattgaaccttcttcttgctcttggctttctgacggtgttttatgccgcgagtcatcttcgagttgggaaaactgagggaagccgaataagtcaatggattataaaggaatcgcataacaacttcttaggtcaaatttttaaaaaccagcatgacgagtccaaatcatatttcataaggtgtaatgttggtctacaaaaaaaataaggattaaaactatttttttatgggatactaaggagagcatactagtaatatgggggactagaaatagcaactccctcgataatttcccccttatatcatcaagagcaacaatgcaaccctaacagcttctgtactatccagaaatatctccaactaacaaaatttagggaatacattttgtttctcaccccgaaaaaatatatagcctcttgttttctttacttcaataaacagatcaatatattttttgtttgcaaatacggataaactattgtttttggtcaaaacacaatccgatttaggccgaaccatgatcaactcataattcgtaggtctttcttttctacacatctttttataatatttccaaaatacccttccccctttccctctcactagcaccccttcccttctcacaggaaacacctccttacctctccctttccattttctctctctctcaatatttcctctttcatctccttttctttccttcacaacccttctatgtcaccagcacaattgtcttttttttccttcacaaatcttacaattttttttgtaatatataaagaagaactatattacaaaatatagtctctatgatgtaattattgttaatatattataaaaactagtttctgtaataaaatcattttgtatatgttatgaaactaatttttgtaatatagttatttttatctagaatgagcttcttgagatgtagaagtttgaggggttttttgaataaccaaggaagctaattcttctatcctttgtttaaactcatccgaagttatttttatataaaattaactacattagaaaaattagtttccttaacacatgtatcacaaattttctatgatacatcccaaaaattcatttaaaaaaatatatttctagtgcaaaaaggggcaaacatgtgaagagtaaaagagaaaaggttacaaatagaatcccatagtttgtttatgccaatgacacacggctagagcaatgtagaaaaatttgggcttagcccataaatcagatcaaaataaagaacaggctaggaagctagcccataaggagcagctttacttgtatttatcacacctcacacacaaccactggttggtgtagtgctatgctatgccaacacaaattttataatttgaccttacttttctcagtccaactccaacacgcaaccaaagcagaagaaacccacaccctctctctatgaatatccccaacttcccgcacacactctccacaactaactaacctccttcaaaacacaaacctcgaaccctaagcactagcatgggttcgtgcagcgcgaaaccctaaccgctttcaaaaactggttctgaaaccgttttgagcaggagtattttaaaaaacggttcaacctggaattctttcataaccggttctgaaccgtactggttttgaaccgagtaaccattggcgcaaaagacatacctgctgtagctattagtcgcagagacgcacgctgtctgggtggagccaccaccgaatggggttttaggggttaatgttggtcgatgtcgtggtacggcttaactagtgtttcaaataaggttttttttaactattattgtaatgtttatttttaaaagattaaggtgtaaatattttttagttcttataattgacaaaagaacctaaataatacattttaaataaaaaattatcaatttagggccatttttaaactatttaccaatctgggacagtgggtcgcgtctaaaattgggcatgactggtcccgccttaatttgggcgtgaccaaggggggtcacgctcagcgtgactaaattcgtcactaaatcggttagcgatcgatttagtgacaaatttttttgtttttctatttttttgtttgcgaccaaaattttgtcgcaaaaactgttagtgaccaaattaacgacggaatatttggttttttattttttatttaatattatttatttttatttttatttaatatgaaagtatttttagattgatcttcatgatagatatgatctgttttacttttaataatattttttatttaatatatttttataattttatatgattttatgtaatatattctggatatatataactaatgtttagtataatattttttatttaataaaatttttcaattttctttcggaatttgcaaaaattaaaaatttttattttttgatacttcctcattttttataaatttttttaaacatttttttaatatagaaagtattttaaatggaatattatatgttgatatttctcattttttatattgagactacctccattaaacacattattatcatccctctcatcatctctttcatcctctcataatttgataattctctttttgttccagtcaaaagcacctagtcaactaactcgttattgaaactacaccgaaactcaggctttctatcaatcggtgactcaattgtgtaaaattagtgtagtcaaaacatatacattcaaccgagaaagggaattagaaaggatcgtccatcttgcatggtgaatgatcaattgtgcgagtaagttggtcaccatctttatctctctgggtaagcgcaatgcaattctttacatttcaatttgattaactttgtctcacgcagttccactcctatttttagagttctgcaatatttcaccgctgtgcacattggaattaatggggtgttacaattccgattattgtgtggtgagtgcactttgggatgagtggaacaagtggtaaaacgtgaaatgagtgcgaaaaagttagaaatgaatgtactctgggataaaaaatccaaaatatattaaacaaaaccatataaaaatttagaatatcgaaaaaagttacaacttttgatagaaatgtccgatcgaggtgtacaatatgtcgaaatgctcgaaattaatagaagtaactagaaaaataaaaaatattagccaattaactgacaaaataattaaaaaattagaaaacaataatttttttgggatttcgaagatttaatcgcaactttgaggcacttaaaggtctcttttgggaaaaatttgcgaccacaagcaataagactaatgtcctcactgatcacaaaactaatttaaaaagttgaacaaaattatgctgtaaaattgacgatgcatataactttgaacaatcataatttttcgtagcaatgtccgatggatacatatttcatgtcaaaatgctcgaaattaagagacgtaattggacaattaaaaaatagcatgcaattaactaattaaatgaataaaaaattagaaaacaagaaattttttgaaggttcaaatattaaatcgtaattttgaggcacttagaggcctcttttgagaaaaaattttggccaagacttgcccaggccttctcctctcaatttcaagcgcgtggccaccggtttcgtctcaatcggacattctagtcaaaagttatgaccgtccgaagtttatatacgcatcgattcacctgtgcatgacacgtggcagaagtaggtcacgcctagaactgggcatgaccagttgccccatattgataaatagtttcaaaactgtcccatttttgtaattttttatttttttttgtatttttttggtttttttgcccttataatttaatatttttaacttttttttaaataattttatttctgtaaattatatttttttatcttaaaatactttaaataatgaaatgttatttaaagttttataagaataaaatataaaacaaacaaaattgaaaataaaaaaaataaaaataatttacaaggataaaatttaaaaataattaaaaatgtatttaaacttaaaattaataataaataaatattttaatatataattaaaatttatgataagatatatttttaaatatataaattatttattcattcataattctattagaaatttttaattcaatttaaaggtacaggtgattaagataaaaaaaataaaatatttaaaaaaaataaaatctttaaaaaataatatagttaacatgaaaaaataaactttgaaaattaaatttaaattgaaactaattaacatgaaaataatcttatcttttgaaaaatataatgtaagcatatgtgtatttttgttgtttgtatgttatgggttattttatgttggacattatattttgtaatcatctttaaaaaaaattaaatcctcttaatatccttcatcacatcacaaaaaaaaattattttattttcttttcaatctttatcgttttctttaaagaagattctcttaattttctactcttatcatttcattatccatccttgtggaaaattcattgttcaaaaatctaattgattttgtttgggaagagatttcatgcatatgcgttaaaggattggtgggacagaagaaaatcttttttcttgattttttttataacaaatgttaattattaatttttgttaataaaaactattcaaattcatgaccttttcattttctttctctcttcaaccaccaagtcaaccttataattctcattcttcccttgaactcaaatatcttcctctccttctgtatccttaggaaaatccaacgttgaaacctaacaaggtaatgaaagctttggcttttttgtatttgattactttagtttgatatgaaatttgcttgagaaggaaccataattgtgttaaaggattggtggaatagaacaaaactcctcccttagacttaaatgtcttctttccttttcctctccttaggaaaaatccagatagaagctttagtttttttgtagtatttgactactttggtttgatatgattttttcttgagatgaatgtattgatgtcataactgtattttttaggaaataacttaataagttgatattatatttacaaatgaaaataatccatgattgatattggtcattgaatttttaatcttcgctcatgagattaaggataatttataaacactatttttgcttaatcccattaagacgccttctaataagaacaaaatcacgaccgaactattgagcaccaaaataaataataactcaaatatattaactcctaataacatcaacgaacttgaggtcgcgacactagcgttgaaccgaaagtttaagccacttttgccctcagtatcaattgggggaacatctttcaatatttcaaaagttttatattacttagaagtcgagattaaatgttgtataactattacatataaagctcccctataattatatttttccgcataaacagtctctcattacatctattaccacaattttgacattaactttcccttttccttggccgataattgggatttatattttatagtatccatgattgaatccaagtggagaagatgttttataagagaaaaatatcctcttcatttattggaggagtccattaggaggaagacatacacacaggctttgtggaatccatcaatatgatatagagaagaactagatcattttataacactttttatttttttactattcataattattattccaattttaagtccgttgatatcatttgagttatcggaggagtccattagaaaagagacatacacataagctttgtggaatccatcaatatgatctagagaagaactagatcattttataacactttttttctatccaatccatcatagtacattttaataaagacagaattgtaacaacatcatcaaacaccaaaatatataatatttgataactcagatgatatcaacggacttaaaattagaataatacttacgaatagtaaaaaataatgaaaaataaagagaattaggtttctattgaaacttttggaaaacttcgtaaataaataaaaaatattaaaaaaactacttgatattaacgtgtcaacctaccttgtgcgtcctacctctaccctaacatgtcacaatccacatgtcaatgatgtcatgctaggcgaatttcaagtaaatacatgtaactcagttcattaaaaatgatgggctgagcaaaaaattcaattcatttttgttacatttttttaattctacagtaaaattagtgtcaaatataagcaaacaacaaaggtgttcatcatatttttcacaacataaaacacaggtttattacccccatttaaaattctctaaccgtaagtccatcttctccttctatagaggttttttaaccaagaaatcaaaaagatcacactaatagtaggattttggtatcatctgaaaatcaattatttttccaaaattaaagtgggatgaatagttattaaagaaacgagtgaaagctgggaaaccataattacaacaactccttgccacaatgtcactcattgcatgccacttatgagaaatgagtggaaaatggcatcgattagctttggagggccttttccgtaaacctaacaaaatcatcattcgcattcagactaatcatcccgtgtgcgtgcaagaaaggagccactggggatgcaccacgctttgtaccacaaaaactctcaaggacacataacataacacattgcattatcatatctcacacttctcactcctccccttttggcttttgcaatgtcaatgtaaaattaatggctgttggtaagcagtaattaatgcgaatatttttttatggtctagggacgttttaatgaagaggttaaaaaataatttatttgatatttcaagaaagtaaaaattctttacaccatcaactaattataaaatatcaccttttttaaaaaaagtttaaatttcattctaattattttaaaagtcacatgataaaagaagaaaatttatattgataacaattaaactctaaaaaatagtgtgtacttgatcctcgaccttatctgcctgtgcataaaaaaaatagtgtgcattttttaagaatgtcaagtgttaaaataaataaataaaaatctcagattaaataacatagataaattaaacaatacataagagatttgtacttatactttatacttataaatgaaaaaaagtcctttcaaaagaataaatggtgaaaggaaaaaaatctttttaactttttaacaatatgcaatttgtaaccaaaatgtagttaaagtgtcgcaaggaaaataaattgttagtccaattgttattatatttaatatttttaagcagatttgagctgtaaattaaaaaaaaagtaattagaaggagaagatttcattaaaatgaacaattattcagattttttataaacttgataaatatttcatatcaatgctaaaaagaaaaaaagtggcgcacgggtgggtgagtaaaagtccgtcctgtgtggtaggcaacgtggaaaatgaagagcgggtaaacaaggagagagagagagagagaggtttttacacaaaggagaattgagttgggttgggggcatggaagaagaagaagggcttgccatgctcatcactcaccttcaccatttctctcactctctttctcctccttttacccttcaccctccagtctctcatcaaatccccaggtcccctcctttctcctagatttacttccaatgcattttttttcctaaaaaaatgtttttaattctccacctgttttgtttggactcaggatgctgtttttctctctacactttactttttgttttcttttatgtttttgtgaacctcatttgttcataaaccataacaaggttgatcctatttttgttaaccagttggttggttggttggttagttagtttgtttctgctctgaaatgtgcaatcattaacaacatgcttcctgaaaacataacctagatgttagattttctgttggttgtcttgttttgtgtgtgtgtgttgttacatgattcattatctgtaattagagcataaattgtgaaacttacgaagatgacttggcccttggtttcccatgtgcttgattttgttctttttgtcatagagaaagttaactggtacaatttgatgatttttgcacattgttgcttgtgttctgaacttgggaagtctcattgttctcagggtagtttgagtaggtttacatcaaattttggcataaaaaaataaaagaggtggatttgattcagacacagattaaaaaaatatgatgatttagaaacatgttgagaaacacgcaagtaagaacaatacaaccattttctattgaggttagaggcaatttctttgctttaacaacacaggcaagttatcatcactaggtccactctcaaagctgtcagggtgtgcatgcctgtatcttaatcacggtgtaaaatgttgataatacttgatcgtaagctttctgaagaatgcttgttaagaagggatggatcaccttggtccttttgtataaaatacggtttcttttgcacgacaagagataggaacagtgctttaatgggcttaacatcaaattgtcaaatttggctagaagcaatccttgcaaagattacagtctgacatggccatttattatttcctcatttactggctactaaaaatcccttacttctaagggtatgattgggagttgggttttggagggaaaggtaaggaaagcaaaattttcatttcttaaaaaacattcacttatttgatagtttttgaaaataaatgaaataaaatgacaaattaacattaatttaacgtcctgatctttgatttatttttatacattttatataactctcttaattttttttttaaaaaaattgcccatccttccttttccctccaaaacctcactcccaaacacaccctaaattgttggttttactatctcatcttatatattcatatttgaacatttatgctttaagtgtctgttctaactgtgtgactaccattattggataaacaacatatggtctggattttgtgcattttgtctttgtcctagtgttatacaaaggaaaagctttcttatcaacttagcaccttggattactgatgtattcaatttgatgatataactgtatatcctcttgatccttgaaatatgcagtagggtcagtcttattttggaataaaatatcaatttgtgcattaatgttatggtctgattttgagcttttttccaatgaattgtgctggtctttttatgcatctttgttctactacagtactactaaattaaatgaagtatatgaatatatttgaacatccttttcgcagattgactttctttgacattgatgattactccgtagatgacttctgtggccttgtaatggcagctggaaagtctggaagttccaggatgatggaacctctaaagcatccatctaagaagtctcgaagagataggagccgtggaaaatcatctggaaggtcctccagggatgaagctatggaacaacaaatttggaaaaatttgcctgaggatctatttgagcctgtgattgcacgacttcccattgccacatttttccgcttccgctctgtatgccagcaatggaattccttgctgacttctcaaagtttttctctgcattgtgctcaagtcccacaagcaaacccatggttttacactataactcatgaacatgcaaattctggagccatgtatgacccttctatgaagaagtggtaccatcccactatatcaacactgcccgcagagttgatagttttaccagtggcttctgcagggggtctagtttgttttcttgacatttatcatcaaaatttctatgtttgtaacccattgactcaatccttaaaggagttaccagctcaatcagttagggttgggtctcgtgctgcgataggaatgacagtaaatgggaactcaactggtgctggctacaagatcctattggtgggttgtgatggagattatgaaatttatgactcagtaacaaagtcttggagccatccagaaaacatggattcagatattaagctgccactgtcactcaattttaggtcacacgctgtttctattgacagcaccctgtacttcttgcattcagatcccaaagggattgttttgtatgatatggaaactggggtttggacacagtacataatcccagcgccattgcatctgactgaccacatgctggccgagtgtgatggccggctattgcttgtggggctgctcacaaagaatgcagccacatgtatatgcatatgggagctgcagaagatgactttcttgtggaaggaggttgacagaatgccaaacgtctggtgcttggacttttacgggaagcacgttagaatgacttgcttgggaaacaaaggcttgctcatgttatccttgagatcaagacaaatgaatcgattggttacttacaacatagcaagtagggaatgggtgaaggttccttggtgtctggtgccacatggaagaaaacggcaatggatagcacatggtactgcattttatccatgcctcactgcaatggcctgatgtagcttgtataatacagcaatgacctgagaatatttccctcaaaacatgaggttctttgcaatttgctggtaattgatgctgatgtaggaataataatgttcattgctggttaacaaagcagatggaaaatgatatgggtttgtagtacttcatgtatttttcatgctctgaaacatgcaccttgatcacttgctttcaagacttttccctgtatatgaaagttgtgaaggtttaattccagctagtatcattcatgttttcaagctggaaggtccaaactggggttggctctaccaactagaattgaagccttgtgaatcaggggagaggcatataaagaacctaaaacgttctcaacctggccttgcagtctggtgtcacttggctgcctcatgctgaatccttgttgctcttgcagtcctgcattacatatatatataacatcatgtttctaaagatatttgtgacttcaaaaggtgtgttcttccacatttgagctgttgagactgctgtctgctaagtgcaaactgtggcttttctcaggttgcttacagcgtcacacgggaaagaagctgggatttcaattttgatggctcctcccaactactcaatgtagtacccttcaagtgaaggtcattattattttacggcttatgattgttgtttctattttgagacagtgaagaaccaaccactatacagtattttgcgtttgaccgcagaatagagatttcgatacagtaactttgtttcgcttgtcaaaacataaaagatgaagaagagtgatttctttcaacgtttcaggttgccaacttgttctggctcgaaaatacaaaagctatcttttgagggtataataaagaaaaatgatacatataaataaaaaaatatttcttataaaaaaaaaacaaaccttatatggagcaaagttaaacatttattttgagtttataagtggtttatgatgaaaaaaaaagaaaaactcaatctttaacttagcattaggggatgcaacatttcataaagtttataatgctttaagtggtttacatttttttttaattcaaattgagttgatgacaagtattctgtttgtattataaagtaaataatctttagtgctttgggataactgcgtcagactgtatggaaactcccgtttcaaagtctgcaggacaacggatagctctcaaaggaatcatggagtttttcatttcacattatcttttgaaagttgaaaccctttcaaattgacttctctaaggtgaattaaatttatattatttattttactctaaatgttgaaccacattataattcatcactcaatcggagaactcctgtcatgagtcatgacactggggattaataaaacagtctttgtggttcaaaacctctttagtcctcgcttctcaccatgggcagctttggctttttgcatgcattataatattcaccccaacgtaagtaattggtagaattaaagacaagacaaacaaaagttatatttttaattaaaaatccttaaaagttcatcaaaacatgaacaggaaccgggtcttgtacaagtacagtacatgtggagaagtattagcattttctacgaggaggctaagaaagagatgatgacacaatccaaaataaagctccatttaagccatgcctccactcgttgctgtcctgattatctggaagagagctgtccatgaaaagagaacacataagtcaatggaactagaaagcaccggctatgaaaatgcaaatggtggaagaaaggtaaatacaatctaacacactccttagcacatatatcacctttagctcaagcgacaccaattccttccagggattgcttaacctggatcgaattccactaaagcatacccttccctaccagctctactaaaatcctttagacacccgcatacacataaataaacaagcaaaagtatttttgttatgaatgcaagaccccaccattttgattcaacgagtattgcaatccaaattattttcatattttttttggcagaggccatcagaaaatatttcctcttcaattccgggtttcaaccataaattagctattcacgtgctttggctataaaggcgtatggatgttgttgttaaccaccaacactttatggaatacaagacatatcacataagaagcaatgtaacgattgcttgcttgcttattttcttctgaaatgatatagttgataagttgcaaacatttattggcatccgacttttcgagtatgcttaaatatatacagtcaacaacaaatgtttaaacccacgacaggaatagagacaaacatcacggtcatttagtttgagaaaacgattatgtttttatattatgttttccttttcagttacaaaaaaatctgaccgtgttttgtatttacaaaagtttgtttatcaaacacttaaacacaaaaaacaataaaaaaaagttaattttactggttcttctacaaagttttaaaaatagaaaataaaccaaaaacaatgtggcgtttttgtaattaaaacaacaacatcaaagccttatctgactacactagatgagattcgttacatgaatcacatgaagtcacatgttttttataattgaaaatgaaaacaaaatagtagaaaacattttgccaccaaaagaaacgaataagatgatgtagaaatgtttctcttacatgatccaatgacaacaaagacgaagaaaccgagcagcactgggccaacagggtagtcttttccctttttagtggttgtgtctggcacaaatcctcttttggtgatgttcttctcaaacttctccaccttcctgtccgcaaggcgccttgatgtcgtctacacaaaaccacaatttccacatttcaatttcaattagcattgcaaaaatcaaacaaacaaaaccaatcaacaagagttgcatagcataacacagggacggcacaattggatttggatggcaccagatccgatccataagctaacgaaacatttcacaatcagaactaataaccataaaattcagaagttaattcgacgtataaataactataacaacaaaacccctacgtcaacaacattattatcaggaatcaattaataatttgagtatttgacctaattttcacaacatcctgattctaattgcagaaatccaaagagatttaagcaatagagtgaattccaattctaaaccaaatcaaattctaatgtcattctcgaaaatttcaaacacgacaaatcagatatcacggataagaaaaataaaaaataaaaaccaaagtcggcaacacaaaaacaagacggagaaagagaaactgtagataaaaaacgagagtgtgaaagtcaacgaagcagtggcgttagagaatgaatgagtgaattaccatttctgttaaggaatagggatcgccggaaaacggtgatggaagaaaccagagatcgccggaaaatgaaagacggtatttatcttcttccggcaatgccctcttcaaccttatttgtgaatgcgtgatccgagtgaaacacggtttctcgttgtttctcccttttactattagtatttattttatatttaacaaacctatttttgttcaactacaattaatttagtggatccccgataatagcgtcacggcttcttaccgattggccaatgccatgtcactgggacacgcggcgtaaggttattcgaacagctttaatacactgcgtgaacaagtcttcgagatggctccaattaggcgtgttaggttaatcattttttttacgaaattataataattgattcacctaaaatgaacagaagaagtttacgtacgtaatttaccttagaacggtgttttgttactatcagaaagggaaatgataagcatcagcaaaccattgttgtataacttgatttaaaaaaattgtggaacattttcacatcatttaggtatgttcaggattacgttaacttgatagtacatttgataatttaaattaaactcaaatgataaatgtttattttgtataataaatatttttaatatataaattattatattataataaattaatagcttgaaatttaaatacataaattatattttagatttataatgaataatttaaattatactataattttttaaattatttacattttaaaaaatatatatcaaattttaatttaaaaataagaaagattgaatgatatagacaattaggatattcttaaccatgtactattttcaatatattttctttcaattatataaaaatgaacaatgatcctgtataatatacaaagtaaaatactaatttataatatagaagtaaatacacaatttaatttacgtaagctatataatatttttacacaaataactaagaaaacttgattatttatttgttttactatttcagttaacaaaaaacacatgttacccatttaatcatcacttatctaaaatattaatttattattttttaaaagtaatattaagccttttttcgttttacatcttttaaactggaaaacaaaaaaattcttctacgaacaacccaaacataaagatgccttttatcaactcgacctttatcctctccattcaccgatttctttgtttaactagtaaaaaatctgctatgatcataaatgcctaatgttcaaattgatctatgtcagtcaccaaattgagtggcaacctatctcacatgattatcaatctttctattcttcatcaattgtaaaatactttgtactatgatcccttgatgagaacaaagtaaaattaaaacattaattcatccatgcatcaaatatgaaatattacatggcctcaaaatgaacatcaagatatatacaattttctcactcttttattcatttatattttttttatatcaaatctctcctttatcaaaaatcagaaaccttacccaatgaccatagaatttagtgggtaacatatgttcaatctatgggaaaagatctgaatttgatatgagagcatacatttttggaaatggataatgagttttaagtgtgattaagtcctattgatgagtcccataattggttcaacggattaaaacttgttggaataccttaaaatatcattggaaaacctaatgtcttaattatggtgacactaaaaccaaaaaaaaaaaaaaaacttatatgaaatattttggtgaacaaggccgcaaagtcgcgttgaataaggatttcctaggctagaataaatgccacgaaaccaattcaggccacagtagtgcttactagagggatatctcaagcccatatttttttaagacatttggtggagttttgggcttactagactgtactcaattttataagcctgcttgttattaacttaaaaaaagtacgacatcatgttggaaaaaaatatacacactcatttataatataagaatattttgttttgtcatctaataataaattatactagtaataaacttgttgtttttaaaataattattttaaaaattatattaaaaaatctaattaatttatgatataaaataattatactagtaatttaataagaaatgtattaatattatgttggttcaaatagaatttgattcaaattttttaaataagattttatttttttagattataggtattttctatggaagataattatgtttaagttggataagactattaagaatgacaaaatttgttcttcgagtttttaagacaattgcatatttaagatttgaattcaactttaggttaaattggaacaatctcaagctagttgatgtatgtgtttgatgattttcaaataagattttaagtttgaatgttttaaatgaaataaatgtaattatgagaataattttaccaaaaatatcaggcaaaaatctctaataaaaaataatcattaagaaaataattcatcacacctaagtggtggtaaaaagaaaaaaaaaattcaagaaggaaagttggagctcttcaaatatcccggcaggtcggctgttgttctgttaatggaagcaggtcattgtctaaaaacaagcaaaaaaacaaaaaacttgttcgatttatttaactaccccgcatcggaccccaaaaaataaaactatataccacttggtaattgtttatgctttctacttttgacactcacaacaagttttaattctgacttgtcaattaccactatagtctttcattcacattaagcacatgtttgatttggtttagattaaaacatgttatttttcttcttctttaaactctctccaaaaagtgtaaaaaataagtaattactttttcaaaacaaactaaaccaaataagtaccaataataaaactatattgcatatacagtataccactcatgcttcttcttagtttaccccttagttttatggaatatttgattatttactatcttttactagaggcattaggcaacaatgattgcaacgaagaatcttctctggcttgcagaaacattttgctttccattttacctaaaagaaaaggcttcgtaaacatttcttcaataaaaatacattacaaataagataatttgaagatttaggactttatgtaaaaaaaaaattaaaaaaaaaccgaccatacaagtttatataattttatttatacagaatgtgaataatatttttattttgagatatgtgaataatattttattgttgatgctttaaactttttgtgatatatcatatggttttcaaaaaacttggtggcacctttctgagataaagcacgttgaagtggtttcttacttaatttgatctcaccttgcctcttccaaattagcaccctgcatgtccctactcatcatcttgcgggtcttggaagcataaacatcaacacgtcctttttaaaaatgtttaaaaccaacattcaactaatccagtcccactaatgtgaacacgtcatactattttttaaacactgttccaaacaataatttgtaccattagtatgatatggttaataagttaattacaatattaaaagttatcatcgcacaagacatatgtgacgaaaataaagatggagggagaaacaaaataactttaattttatacctaggttgcttgtcatgctaatattaattgttttaaccctctttgtcctcatgggattgacatgtagtttgtttggtttagtggccgccgtactccatccttatatattagttgaataaatggattagttcaatccacattgatgtacatttaaataaattagaataggatagttttttgtaaggttcatgtctaacttacctagctcgtgggttaatagactgttctgtaagttgaaagattaaaaaattcgagaccaatattttttttctattcaattatttaatgtgtttaatttcctttgctcaaggcctcaagcaagataggtgcttgaagttgtttgcttcagttgaccaagatgggtgccttgtgtacgcacctgataaagttaatagaaaaggaaaactggtgacgatagaaagtggttattggttggagatgcttatgttttgaacttttgataagtgggatattgttgtgggtagaggtgattggacaagttttgctatttgatgcaaaaatagtggtgtctatttttcctcaaaagtgcccaaaccatgcatggttagcttacatttatgataagttaatcttataattaaaatgataaaaaaaattatttactacaagtattctacagaaaaaacaaaaatacatgaaatgttaaacattattaacttactgtaatactgtatagtataatttagagtcgccagtttcttcagaatttgtttaattccaatcgctattaatagcattgaggcattgccaaattgccttccacttctcgtggcgcacaaacaaggattacgcatattgttcagggccggatccagaaaaaaaaaaaaataagggaggtaataatggtggggattaggaggcggcgcttccaaaatttttttttgaagaaaattaaagaaacaaattattataacaaaagtgtgaaaaatgtataatttaaaagataaaaaattaacaaaattagaatgtgattggtgctcaaaagtaaaagtgtagtcactgcattcataaaagttacaaacatacatatccacactcactcttttcttatttttcatcctttcttatttttcatctttttttattattttttttctatgtttttcatttttttctcttatacaaagtttaaattatttttttattttactttattttattattataaaaaaaattctattcttgagaatttaaagggggacattgcctccaatttaacacctgcgtccgcccatgattcaggtgaccctacattatttgatattgattatgcatgttttagttattattcttcgttagtaattaatttaatcatgttttattacattaatgatattttattaccattttctttactgtcattgtacgatataattccaactggatcataattcgtcatggtaggttgcgtgtcttcttatgaattttctgattatttttctttgaattttttagagtatttatctcatttcataagtgacagattaatttcttaaacataaacagatattaaaatgatgatatttttcacaagttgagctcaagatcgcgtgttcaagaatccaagtcacttccatcagatgtatctataggtcctattttgataataacaagatttattttgataataacaagatttaattaaagatgtttgttaatttatgtttatttatcacggggtatttttaatccctttacctgtcccattgcacttgacatgtacaccggtacacgtatgtatatttaattattaattaatatacacaaaagaagatcctgttggggaaatgggaatgcccatgtttaaaaacaacgtcacgttgcacattcaatgaatgtgtgtttaatatcatgttacaaaaattgattataaattcaaaattgatttatgatatactttttacatgtttaattttatgttaaaaaaatccaaaaaaagttataagttgaagtaacttaatttaaatagtttcgattagatccaaaaatttgtattaaattttactctaactaaattttataataacaaaaatatttaaacataaatcacgtcattttaaaatcaattttaaaattagtttcattcaaaatcaattttaacactcatccaaacacacattaaacaatttatgtcatgttacttgagggcagtaccacgaatgaactagtagagattattttcatttttttctttttttacagatttttttaattgtaaaaaattatacaatcaattaataaaaaaatattatataacttttaagacaaataatattgaaattaaaaaattcgatatacataatactcctacgaatatgaagtataacaatttgtaattaaatgacttttgcattcattattttttcttgagataaagaaaaattataattcaatcattattcataattataacaagtttttttgccttcattatctgctcatacgaatgaggtataacaattttatcggggactgtacttttattttaatccatctatatgtatatgatcatgtacaattcacttggtcaaagtactcgttttatagtttccgtaccagctatttcttacaaaatattatatctgaggcaagaaaataatttatataaatttatgaactatttaaacaataacaattctggtccaaattccgcctttcattattttattcaattatgtgtttatctaacgtaaaaagcatttttgagtactatgagaagtggaaatacaggtgtaaaacgggttaactcaactaaaaaagggttgggattgggctgaacccgttgtttttttagagtgaaagttttaacgtaattcatctgtgacggattgtgggttgagttcactcgccaatttattttttcaaataaaataaattatttaattattttatttatcttaaaaaacttacaaatttcataatcaaatgtaattttaaaaaagataaatgttataaaattagtaaatcaaataaatatttaagagattatcataaaaaaatgtaagtgttaaatgtaatttcactttaacaaataaaaaaaagatgatggattgaaaatttcaatccaatcctttagacgagttatgtagttgatgtatcgagttaaatctgttttgacatccataaatagaaagatgtgattattgtttactatatataaacatgttttaacattttaaatgcatttataaactttgacagtgcattagatatttgttagttttttttatcattatgatattagtgtaaattatctttcaattttgttgatgattaatatttatcaaaaaatttgattaattatctttattgaggtatttcctttaaagtctcaatcaagttttttttttcagctacaaaatttgaagacctaattgtttaaagaattcaagtttattatcactttgactgatgacatgttaatagatatttgttagtttctactatctcttttacacctattatattttcttagacgctataaaataagctgaggtgaggnnnnnnnnnnnnnnnnnnnnnnnnnnnnnnnnnnnnnnnnnnnnnnnnnnnnnnnnnnnnnnnnnnnnnnnnnnnnnnnnnnnnnnnnnnnnnnnnnnnnnnnnnnnnnnnnnnnnnnnnnnnnnnnnnnnnnnnnnnnnnnnnnnnnnnnnnnnnnnnnnnnnnnnnnnnnnnnnnnnnnnnnnnnnnnnnnnnnnnnnnnnnnnnnnnnnnnnnnnnnnnnnnnnnnnnnnnnnnnnnnnnnnnnnnnnnnnnnnnnnnnnnnnnnnnnnnnnnnnnnnnnnnnnnnnnnnnnnnnnnnnnnnnnnnnnnnncttagacgctataaaatacgctgaggttgaatcattgatatatttgttgaggagaaattgatctaattcaaagttgttgatgtttataatgataaatcatataaaaaagagattaagttacaagaataatattttcattactaaatatatcatacaacctaattttactcactagtctatataataatgtcaagttgaatataatcaacatattgcggaatgtgtaaacatttcctcacttgtaaaatacatacacaaattttgtttaagagnnnnnnnnnntttatacaatagtatatttattcagtatctcactttttaagagaaattcaaaatatataatagaagttattttttttaattgtttagcttatttatgtcgattgattgatttttgtacgcggaattggtatagtatttaacatataaaattagttttgaagttgaacctttgtctacatcatgctgagaaagctctgatgatgtgttgtttttaatatttatttcaataagcatttaataagtcatcaaaccacgcaaaacatgagaactcgagctgctctttactaaatgatacaataaacaagctaggtactaaaattgtttatatataaattaaatagaagaactaactatttatatgcatctataattaattaaatagaataatttaattcatcgattaaactgaccaaactataataacgaatattatttaatatttgaatactactactatttactttatttttaaattcattgattggatattgcaaaaagtaacttccaagagatacttgcgagccatgaatcatctggttattaaccacccccttcttcacacgatattttaaacaatattggagtacttatatgaatattggagtacttatatgaatgatttcttcacacgatattttaacaatattggagtacttatatgaatgatttaatctttaacacaagcctgacagacaatactaagcggaaattttattttatgattattatgatgagtatggttaatcgatggcttcaagaaaccagttaaaaaattaaaaattaaaaattaagaacaaataaaaaacaataaacaatataattttacacattttaatattttttaatttcttaataaatgttctaataaatatttcttatatgacaacattcatttggaatagggcaagaaagttgtgattggtacaaaatacagattttgtgagtttacactggatatcctcttagaaagaacttttaatttcagaggacacaaaaaaagaagtgagtagtgatgacctaatcattttatggccactctctttctctttgattaagtgtcttctattcttgtctttctctttccatctaaattaccactttgcattctttgatgctccccaaatacttataaaattatgtttttgttcaatttcttaaatagttactatgaagaccacttttattttatatatcgaataacattatcgtagttggagattccctgccttatttcattcaattattacataaatcaggtttttagttttaatttttacaataaacaaacctttttttaattttttttttttggatctgaatacacgttaaagccatatttgggggcctaataaatacccttacatatggaatgctcaaaaagttaaaactaggacactacaatattaggaaaggggagaaaaaaagaaaagagagagaacaagttctaatgggtaaagtgacaaatgacctaaattctctcacaatgttcccattcttgtgttggatcaattaaatattggcagaggagagtggtaaacagtgatgttcttatagtatagtgtctgaattcagcgtaaagttagatatgtggctaggtgcaactaaactaaaactataaactaaacagtagacagattcgagggggaaagaagaagaagagaaataacacctcgagaggttctaatcatgcgtggtgcctctatctatctatatacctacgtcttttgactctgggtcctccctcccatggcaattttgataaagtactacggggtatcaaatgccattgtgagcaaaagaagcttacgccttcttcttgaaattttggttccatgcaggggcacttttgccaacacaaaagtacagctaaacaaacacacgcacgcagagttaacgacttagcgtgaagaagttgtctactggcatggacggatagggatgtgaacacaaagcaaacaaaagttataaaaggctgtgatttctgctcagtgggactatgccttttctgccctctattttgttattattgttattacacttgtgttcaaaatatacaataataaatttattttttataataagcttgttaaaatatattaatgtttattgctatattcttttgacaagtattgttttttgagtggatagtttggaaagagataatggcctataataatatattttaaaaacatttgtgctatgctaccgtattattcttatcatctttgctttgccaaattctcctactacctgagctcgatgaacaacaactcattgctttaaagctcttgtcagcttcattctccatgtttaagtgaccttttctttacagtgtgcagctaacttctaagaaataaaaataaaaatctctcgaacacactcacgtgcttgtgttgttcttgtttggttctagggccatgaagtgcgagctagtagagcttctttgcagagtgatagtgaaaatcgaatcttttgtaggtttagttttggcccttcctttttgttctgcgccttggttggtagctgctgctagctgacaagataataaggagtatcaatttctgtttagaattagaaacccagaatcttgtgattcttttattctttaaagggtatttgaatttttcttatctgcctctagtttcagtgttcattttgcatttctgaattttaagctattggggtggataagacagcatcttatcaaggtcacatctcttattattatttttaataaagatgtcttttttatttttccttccccttcaacctacttgtttttaggaattgggtttgtgttggtggtggtgttgttcatcaaaatcttgaattttcttcaaccacaagcctaaaaaacaaatcttttagtgaataggtgtgtgttagccttgtggggattctgtggatttgacagcggttctctcctctcctctctctctctgcctctgtctctgtctctgtctctctctctctctctctcacacacacacacaagcctacctggaatcagctagagttgacacccacaacctgtttgaactgtttctttttaacttgtgttggttactgttgtggatgagtttgctccatgtagttgggtttggtctaaaagtggggcatctacttttggtgctatgttgctgggttgtgtctgtcgtttaccttaactggtttattagcagtggaattatggaaaccaagatgatgggtggtggtggtggtgctggcaagatgtggcacaaaaaatggtgggagaagatatcagggcagggttgcaaaatccaccaacagtactaccagtatattggctctaagaaagttaagagagcgttatggaggaagattttgctgacatgggtcgtgggttggttcatagtatctttgtggatcttctgctacatgagcttgcaaggtactgagaagaggaaagaaactcttgcaagcatgtgtgatgaaagggctaggatgctgcaggatcagtttaatgtcagtatgaaccatatccaagccatgtccattctgatctccacctttcaccatgctaagagcccctcagccatcgatcaggtactagtctttactttgttattgcaaatcaggacctaattcctcaccttttgcttttagtctttgtttatgttaccttaatttctgtacacataggtttctgagttgtttcattgtcattaattttagtgtctaatagcattattcccccccctctcgtggaaaatttattcggattttagtattatatgttttgctaacaaggttactgaacttgagcatgacctgatttccttgtttccccaccttcttgttggatagaaaagatcctactttcttctatccttcaatctttagtctcatctctacaaattaatctaacttccaaaacttgcagaaaacttttgcaaagtacacagaaagaacagcttttgagaggcctcttacaggtggtgttgcgtatgcggtaagggtgctccattctgaaagggaacaatttgaaaagcagcaaggttggactatcaagaggatggatactctagagcagaacccagttcataaggacgactatgccccagaggcattggagccatcccccgttcaggaagaatatgctcctgtcatctttgcacaagatacaattgcacatgtgatttctgttaatgtgctttctggaaaggtaggtttctgatacttgcaaaattttatttgtggagctagtctgagccatatattattaattatgaaaattgtgaaaatgctatacaataaactttgatgtcttgatcataattttaattcatccattctaagctctttattcctggtagtatggttttgactggtcttttagtggtcattaatttgttttgggagaatatttatgaagaaaaaactatctatgctaccattttgttgtttttgtacccttgtgcttcctttctcttgcttgtcctgatgggactgctcctgatggagaatagtacacgtgaatagactctaattttgtgaatatcacaaacctgaattgagacacgttgttcttgtttgatatctgaaatctatggcaatttatttggaattatgattgtcacagttattcacttgttcatcaacaggaagaccgtgaaaatgtgctgcgtgcaagagaatctggcaaaggggttttaacggcacccttcaggctgctcaaaacaaataggctaggggttatcctgacatttgctgtctacaagagagatcttccatcaaatgcaaccccaaatgaaaggattcaagcaaccgacgggtgtgcctaaatttttgattttttttgcatctgtcattcattaatttttttggtaattttttatgattttttatcattcatataatttagcttattcccttttggtcatctaaagctttgaagtaactagtctactaaataattaattgatgcattcaaatttttggagagaatattatgaactctattaatgtagaaggatgaacaattattggttcttccctgtgataattagaagttttggaagttacaaatctacttttaaattcaataaaactgatggtaaaaagaaaaagaaattatgaacacagttaaagagagtagcaaattttatgtcttcactactgcttgctgggcaggtatctagggggagtctttgatgttgagtcattagtggagaaattacttcagcaacttgctagcaagcaaagtgtaattgttaatgtgtatgatactacaaatcatactcatccaattgccatgtatggctcaaatgaatcaggggatgttttctttcacatcagcactcttaactttggagacccttttaggaagcatgagatgcactgcaggtaagagtaatgctacagaagaaatctaatatctccgtcctccttaatgctcagtgtagtttgtaagaataacagtgtgccaccttgaaataggtggaggatatgacttaatacttcatgatttagtggttttgctgctagcaatacctagtctagagttgttttatctggagttgtcatacttttttagggccattgaatctaactatttttattttaatatatattacaattaaaatgtacaaattgtcaaaagacttgaagtattcatgaaaattaagcttgatggtaatgcaggttcaagaagaagccaccatggccatgggtagcaataactacttcaattggtatccttgttattgcactccttgttggacatattttccatgccactgtgaatcgaattgccgaagtagaagatgattatcgtaaggagatggaacttaaaaaacaagctgaggcggctgatgttgcaaaatcccaggtatgtaacttttattttattttatttattttttgaacttgtttttgcttaactcatactgatcatgtgggctttatccattgtaaccacagtttcttgctactgtttcccatgaaatcagaacaccaatgaatggtgttttaggtgagttgtcttctgtctatggtttagtcgattatccaatttttaatttttaactatatacattccacaaaaaagaagagcttcttcagccatgaccctgctctaaattggattttcagggatgttgcatatgcttatggacacagatctagatgttacccaacaggaatatgtcaggacagcacaggaaagtggaaaagctctggtgtcacttataaatgaggttttggatcaggctaagattgaatttggtaagctagagcttgaggctgtgctctttgacatacgggcaattttggatgatgtattgtcgctattttctgagaagtctcaaggaaaaggagtagaggtaatatatctctcgtctactgtgcctttttatcatgatggaattttcaaaatgtgcatagtctaactatagttaatggcttttcataatatttttttgggaactgcagttggcagtttatgtgtcagatcaggttcctgaactactaataggtgatccaggaagatttcgacaaataattactaatctcatgggtaactccattaaggtaagtttatggtagagagaagaacattatgtataattcaagttatttagtctgatatccttcatataagttacttagagaagttcccttgtcctacatccttgccttataggcatgctacggtcatcatagtctcatgaaaaaaatattctatttactatcctgacacatcggtaaagttgtgccttgatgacttgttggttatgggttcgaatccggaaacagtctctttgtatatgcaagggtaagactgctacaatatcccccccctcctccccttaccttcgcatagcgaggagcctctgggtaatggggtacgtagtttttagttttttactgttctagccaagcatgactactaatagagcaaaattgatgtgtatttcttgaaaatattattaaaactgattctgtaattgtttggcagttcacggacaaaggacatatttttgtcacaatccatcttgttgaggaggttgtccattcaatagaggttgacaaagaatccaactcagaaaataccttgagtggctcccctgttgctgatagtcgccggagctgggaaggattcaaggctttcagtcaagagggacctcttggttccttttcaaccccctccaatgatcttgtcaatttgattgtatctgttgaagatacaggtgaaggtattcctcttgaatctcagccactcatctacaccccattcatgcaggtaggtccatccatctcccgaaagcatggaggaacaggcattggcctaagcattagcaagtgtttggtgggcctcatgaatggggaaattggatttgtgagcatacccaagactggatccacattcacttttactgctgtattcaccaatggacactgcagttcaaatgagtgcaaaattcagcaaatcaacaaccaacctcagtctgcatcttcagaattcgaggggatgactgcattaattattgacccaagatctgttagagcaaaagtgtctagatatcacatccaacggcttggcattcatgttgagatggtttcagatttaaatcaaggtttgtcaatcataagcaatgggaatatagttattaatatggttttgattgagcaggaggtttgggatagagatttagtcttgtcatctcactttgtcaataactcaaggagaatggaccagggggttcctccaaagctgttcattcttgttaattctagtagttcttttaaagctagtgtaaacttgggtgttcataatcctactgtcatcaccaaacctctgagagcgagtatgcttgctgcctcactacaacgagccatgggtgtccaaaacaagggagctcctcatagagagcttcaaagtttgtctcttcgccatcttcttcgtggcaggaaaattctaattgtagacgacaatagtgtgaaccgtgcagtagcagctggtgcattgaaaaagtatggagcagatgtggtttgtgttagctgtggaaaagatgccatctcttccttgaagccaccccatcagtttgatgcctgtttcatggatattcaaatgccagaaatggatgggtatgtatgcacctggagtactttctttcagaatctgataatttatcattttggagtaatatttggaatttctacaaacatagaaaacagtttttaattcttttattgatctaacagaataattgaaaatattttactgaacagtttacatcaaaggaaaactttttgcactgcaaagatttgtgaaacaaactttgtattcttagtcttccatgaactcaataccaactctacttatccttatctgggtatgccttcggcttcctcagggtatattaagcacacaaggtgtttggagtctaacttgctacagcaatactataaatataattcatttgacaattctacaacaacaatggctttgtctcattgaggttgaatacatggatcaaatgatgccattgagctttgataaaaactaaattctaagggatgttatttaccataaaatctctttcaataatttcctttaatgtccttttggtctcctatccttttcacaaggctaaaaaccatgcaatgtactctcgtcattgtgcctttaatgaccttttttacatgtgtccaagccatcttagtcgattttttgtcatgttcttgataggtgttataccaatatctcctagtatacaatcattctgtatcttgtactttcttgtgtagtcacacatccatcttcacatactcatttttgctactcccacttttttctcttgatgttctttcaacactcaacattcactaccataaaatatgacttggtgagtactttttagttgtaaataacctccaatgttttctccattttaattgcctggcttgtatcttgtgtttggcattttcattaatttcccataattttataatattaattctagatatttaaacttaaaaacttgtgggatgacattccaatttttacttccaagtcaatttttttcttatttcttgctaaaatggcaatgcatatattgttttactcccactgaatctaatgtttgtctccaaaactaaactttatagttaactttttcccttgattccttgatttaagttatatcatttgcaaaaagtatgcatttagtgataaacactttggctattttcgggtaatgacctagcgttggcacacaatccgtcgttaatgatccacgtttgggctttgaacaagttttatgttgattgcaagggactaatacaaacctcttcctttgtccagcctttggaaccagctatgagcccataagtggagtcaattcatttgaaaattctaattaaaaaaattatttgaagaatttgtttatctactttttatttctaaatcatgaattaacatgtgttacgattttgcaaataacaattcttttccaacagatttgaagctacaaaacgagttagggagttggaagatagtgtgaacagagaagtatctatggatgactttgagaatattacaaactggcatgtacccattttagccatgactgcagatgtgatacatgctacacacgaggaatgcctaaagtggggcatggatggatatgtttcaaaaccctttgaagctgaacagctgtatagagaagtctcacggtttttccagtcatcttgaaaataaaatacagtgctgatctaaaccagataaactgatcatggaagcatagctgtttgtactccaggacactctgaagtgggtaaataggttcagaagtctcctgagagtaagttccctatttaacagccaatgcatgttttagtatttcaccacctcaaagtttgggggttgttcactagagactgaagaatgttatctatctcatctgaaaggaaaaagaaaatggaacaaagggggacaatattgtagaagttcagaaatggttcattctacctttttgacctattttgttgtcttttatgctgtgtttgaaggtccccggtttaaaacattgtttttgtggcagggagtgtacataggagccaagtttgattggttgcaattgagttgtaattggttgttaaggataccaaaacccatattaattcttcttccatgtaaagtcagcctctcttctcatccgaaatgattgaggctgattagaagactagggtgtattataatacaggttctggagtttcatccttgtgtatgtaataatacaacttatagtgatctagcctagggacgctacattttatgtgtattgatgcatgtatcacaagggcgaattcaggtgaaaggaagaaaattagcttcttggcatcaaaggggaggaaggaagctagtccaccatcaatctttgtatatgactcacaataaagatggtgattgatgtatcacaccaagcttgcttcctttggttcttaacagtgctggaattcggtttggaaacatgtaactgatatattatactctagggtttgagtgatccaccatttttttggccgatttgtacatttccaatttctggatttcctttgactcattgctcttgccttgcacatctcatgaaattattcctttttattttttattatctcaacagtattttttcaaaaaaaccgaagttgccaaattttgatgtcaggagttacctaggttgattttaacgtgcactaacaaggtatcactgggtataacaggttaagtaatgtttttaacattttatttgtccgtcacattttgatagacaggactttatgctctacaaaattgttgtatggttcttcgtctaaattagtaacagacccgtcttgttcttcaattcatgaaggaggatctgaattctagtctcaaatatactaatataaaattattcctgatacatgcttttgcctaaaataaacttattcctgatacatgcttttgcctagtatatcaacttttggatatgactaaaaaataaaataaaaatagaaaaattaagaaaaaagattctaaagaaaatcaaatcaaattaaaataaagtttacttgagtcagatcaattgatcaagttataggacatgaaccgtgggtgcagagttttaacttgtcaccccgaattttctcacttttatagtaagacataatataaccctctacttacacaaaagagacaaaaagtatcaactgttatatttgttttttaagcttcatttggagtttttttttaacaggccataggaaagttaaaaaaatcaaagggaacataaaataaatcattgctaaaataataaaaacaaaaattaaaagtctgaaaatgattcaataaaattgaaaaaactaaaaacgttgaactgtataactctttaaagtacaaatgagaattgactagaaaaacactaggctaaaataaaacgaagtgtcaacgtacgttggaagttgcaacatctacacaatggatgcaacattctcaatacaggttcttttaaaacagcatgcaatgccatgctgccaatgcatagatatggctctttcatgagttcgaaaatcgataaactaatactaattggaaaatacaagtccgtcacatctcctggaagtaacttgagtacgtttcactgcaacagaactgatatttacattgactttttcccccaaatcaatgtgagttccagacacttgattctacaataattaacatagatgcatgcatcaagtcagatgcttttcctcctcgtagcaggagactgtgacaacgtaaaacacatagtaaaagttgcatcctttgtataaatatcattaattggtcattgtataccgtgtattctaactaagaaacaggtttctatgtttaagaaattccactaaatcaatcatatttaattcaactttgtatttattcatttcctaatgaattaaaatgtgtttgatttgatagtagaatatcatgatgagatcaatataaaagtaactatttattactttaaaaaattatagtgagtttaactcatcattttaccaaacatacactaacctgatggttcgtttagatagtgaacgtgaccttccttaccctgatggccttatcaacattggtaatggttaccagacctacaacattcattcacaatttgagcaatttgcttgtttaaaaggtgatgccaagccatagcaggtgtagcaataattggataataattataagggcacttgattgttgggtgtacaagacttacacatttcagatatcatatgtggggctcactagttccgtcaatttcacaataaatttttccaccggtttagtaaatacttattggtgtggatatgcatgtttattacctggagcaacatgtgacgtcaacattgtacacagggcacaatgaatcaatgatgaagggaactttgttccaacacactacaacagaaatgaaaaggaaatgcatcagcgttaacgatatattaattcttgaatatgctgaaattcaaaactagaaatacaaaatcatgtcgttgaagcttcacggccgttatttaggcagacaaataacatcccatacacttatctttcaatagggaatcttagttttacacattattaggttcttatccatcacaagggattttaacacacacatatatagtactattaaaagcatatttgtgttactgtgtatccgtttcaaacgaatgtaaatagcaaaaggacagaagaatttaacttgtctgagaagtagaaataaatgtaactaaccctcaacccatctgaaactaaaatctctataatttgaacttattacactatattctgtctatttgtattaaggttagattcaatttggttattacaaatgtgattttcaatgcaaatctaacggatatgattattaatttgttgtgtgttttcatacaattacaatagaatcttttgtttagaggaaatgcagttagcatatgtacacaaatagtctctttaaatagggttttcacttttcttttccacaattcatcaactaaaaaattgtatttcatcttgaattagaaaaatctattttttaatctcaacctcacttttttttttaatttcactaataatatttttttaaaaattttgaaccttttagactattttcgatcttaaagctacactaaatctctaatcaattgaataggaaataaatatttaaagttaaatatagaaaaagtaattgaagtacttaactataataatttaaatatcaacagaaaaaattcaaatgaaaatcattaagcaataaaattcacatattgatcataataaagggataaaaatataattaatttgttaatatttatatgatttgcaaagaaattttttgtaatcaaaaaatgtatgactaaaattcacatctgagtcgatatgtccgagtggttaaggagacagacttgaaatctgttgggcttcgcccgcgcaggttcgaaccctgctgtcgacgaacatttttatattttgattatttttactttgtgatttaatttaggcaaaatttagtaaatataacttaagatgcagaaaaaaatgattgatttacattattgactaaatattttatttgtaaataaaatttgtgtgagatctaataaatcactatttaatattaataatgttgaaaatattaatttataagatgatatattatcatttaattaataaaggaaattcaaaataaagattttaatatatcgaactcaaaacaaagaaaaactttattaaaaatctagaataaaattcggtcatttattaagattaatttcataatcagattaaaagaatcaaaatttgcgaatataacttggtgtttaagggggaacaaagacctaattacgatagtatttatattttggaaatttgactgttggtacctaaaagatacgcgagggtgtagaagtgtagtatatagagagggtgtgtgtgtgtgcgcggagatagagagagattgggagagggagagaagagagaatagagaatagagatggatccagacgcgttggcaaaggcattcgtggagcactactacagcaccttcgacaccaaccggaacggtttagcgaatctgtatcaggagggttccatgctgaccttcgaagggcagaagatccagggcgcttccagcatcgtcgctaagctcacttccctccctttccagcagtgccaccactccatctccaccgtcgactgccagccctccggcgtcaacgccggcatgcttgtctttgtcagcggcaacctccagctcgccggcgaacagcacactctcaagttcagccaggtactctccctctctctgttagggttttattcgcactccgatccgtgataattactcgattcacgtttcgatctgcctaatcctgtgtttcgctgtgacggcggtctttgacgttgacgcgcatgctggtttcaacgcgattgacatttctgtgcttattgcttttgaatttggatgctgattttgctcgtgtgtttgattgattaacgtgtcgatttgttcctctggaaaacctaaatttttaagtgttatggggttttcgattgttattaatgctattgacgttggaatctggaatctatcacggagagaaggaggaattacgaaggttttcaaatgaattggcaattgattggagagaatggccagtttgtgattgggaatctagggtagctgcagagtcaaggcttgtttagagtagagagtgagtggcaaaataattatccaaccttttatcataataatttcaatggactgtattgattggatcaaagttgttttttggattgtcatggattgtactacagcatatctgttggatatccaaaggcaacttggtttctttacgtttcattgtgccctcaaccacactattaactaggggaagtccttctttaagctctcaaattttggatgctttcaacatgcttcttgatctcaaccttcttcctcatgtgctcttaccaaccactgttcttgtctttttcattgatatcaatttgctagcaaagttattgcggttttctttatcagtgctttggtaggttattcataattcccctcttccaaattgcgacctggcctagtgacctgaatctgagttcaatttggtgacctgttgggtccttcaaaacagttttttattcaaatttgactcaaatcttcctgttcttctcacaaggtcccaatggaatttcacaagaattacactaggaattttaatgaattttcaatctctataagctgagtgcattcaactctgacctctatgtaagcaggtgagattatgatatgggtatcatgtcaaggtgcagcgccaagtctctctttaccaaaattgtttccctaaaaaaattaaaatcaatgatcattacctgaacaaacagctaggactttgcagttagtcacagatgttaacatcaaggagtttatgtggaagttaagctatgatcactaccagtaggaggcatgcaaaattgcagtgatcctcttcgttgagaactagttctctctttatatttaattcaaccatttttttttattgtgactactgagtttccagtaaattattttgttctatttatctcttaataaatttaaggagcttaatttttttgaaaaaacatagatggattgaataacttatctgtatggatgggatggttgggtatccatctatcaaatgaattgtgattgaattgggtttctattaatcatcttaggtcttctttgtaattaaagaaaataattaaatttgtggtaatagatgaagttgggtttcattacagagaagataaagtacttcatgtgattgcattaataattcaaattttcattttttttgtttgttctttatagtaaggttaatttttacgatgtactcattttaccttgaacttagaagtgattgcctcatgatagaggatctaaattcctgactctgaatggaaatgatgggttgtccaaatcctgtcatttcactcaaatgatggtgcctaaatggaagtggaattttatttacagtcttacctccttggcatatttttgttaacccttactacacatgtttacatgtgctcttatactggtaaattgtacattatatttttcctgtatatgcagaaatattgtttttggtgggcacttcatcttattttcttgctctattgtcttctcatgttactgtttctctaatttctgtccatcactaattttgtccactcttttttcagatgttccatttgataccaacgcctcagggaagctattatgtgttgaatgacatattccgtttgaactatgcatgaagacatatgacctgaaaggccatagatgaagtttgcctattgctagctgtttcagattgcacatttgaaattgaaaatgagttatttttggttggttgtgttgaacgcttaattgtgcctgttgtgtttagaattttctgttgtgactggttaaaaactcaccttcaaggataaattgttgaaagattaccgagtgttggagtttaaaaacttcaatatttttgtgatccgcgatattgaatccaagcatcatgatccagtttacctctacaaattagtttatgcttcttgtcttaatttttttcctttctatttggtgctgaacgaaggattgttttcttcgcctaagatcagtatgactaggcttggaaaagatattactgtagatgttattgttttataataaattgtggttaaaaattaaaatgggggctattggtttatgtattgaaaaatatattaatgtagagtgttacaggtgattgatataaataagagtaaattatacttgctatcttttgtgttttttccaaattgttatttgatacctcttcttttttgcatcctataaaaaatctcttaaatgaatcttcttttttctaatcactgtttaataatttaatagaaaatagatacatgttagtcatgtgacttttaatgaaaatttatgtctaaaaatattctcatctttttcaaaatcatacattttgggttttacaaactctcatattcttcaacaatacatcttcacttaccaccaccaacttcttttcctcctccttcctctttcactgcagcatatctctttcttctcatagtcgtcttcgtccatcaatatgacgttcgaacgcatccactctcgtcaaagaaatcaccattatcgtagccactgctaccaccatagttgtcgccgcaatcaccatatccacctctatcatctccttgtcctccgtcgtagcttcggccatcatcagtattgcgtctggtttcctggatactagcgtcgtagaggtccttgacacgtccgtcagagtcatattcaagggatgagtatcaggtacaatttgaggaaaaaaaaatactgctcaaatatttcaattaacgttaattaatgacgttaatagaatgagataaaagtaatgtataaaaaaataggaatatcgaatgcaatgtgagaaaaaacacaaatgcaagtaaaattccctctaaataaagattcattcctttctcctactcatacaaactcgtgcatttaaaaagttatttcctttttaggaggataagttattaaaaataaaatttaaatattatatatatatatatatatattcttttatgtcatttgacaattatcaattaacttatatagctagtcttatccaatacttttaattaaattagttaatttacaagttatcagctagcttataaattagttttatcaaacagtctaaaatgaaccgagtcagtatgcttaagtacaaaagagattaaaatgatatgtataggaactaaaatgaataattgttaaatataagaattagaaggtaaaatttgtgcaattataaaaactaaatgtgtgattaaatctcactaaagtaacaataataacaatttgttattcgaacctcaaacaaccctaatagcaaatttttattcgaaactcaaacaaccctgaagctaacctcattccaacatttcattcaatgatgctacattttcagataccttgtacagttgtaaagaaggtagcagccataagctatataaaatttgcgaagatatcaagagtgcacgcaaggagatgctaaagaaacttaatccattcaattcgaaaccccaccccacctgcattcaagaccatttcatattttacaaagtaacaatgttcatcgttattttcactatacaatctagactgtttcaaactaataagtcagcttgttctagacatctagatacaaagaccatcgaaatggttgtgccacaaactgatcattcaaaataatgaagactaccaaggctagcgttgctcctagggaaatggataaaaatcatcaataaataagtcatctcctacagaagttgataatgatgcctcctcactcgtacccgcaagttcagcctgcaagggaattgacaagttatgcattaacagcacaaagcaattgcattctaaaaggtaaaaatggtttatagctctgtatggttactattttgtctttatttttgattgagcacggaatgccccatcgaagcctcatgctaaacaatgtttaaattattcaactagtggcaaactaacacatgctaaagagatattggttgctctgcttaataaaatgcaaacactttactcttcggcttttagactaatttatttaccttagcttgacgatatttctcaagcatgcgatgatattgctcacgagcatctggtgagttgaccatggacagcacccttgaaacagcctctttaatttctacatcaactttctgttttcggaacaccttgagaatatcttcatcttcatcttcattttcgttgatgtccatctcttgtcggaaacctcgtaaaccagctccttttctcctccatcgtaggacaaccttgtccaagattccaactgcccatattaccttgtaatgcttcctaacctggtagcccctcacatgagcctgcccaaataaattagaaataaccaaggttgataataatgccgttgaagatcaaagtatgcacgtgcatgtgtagcttgcctataaccagctgttttttggtttaaaaaacaaatttattcactttcagagtatctttaagtgctagttatatataaattaagaataacatctatgtagctcttggaattcattttgttctagtcaaactataaagttaacatctattacctgtatcttcactactttttggcgcaacgctaagaaatctttgcgacctttccaacctcgatatttcttctgaatcgataaagcagctgaagcagctgaattatattcacgtgagttccgaaaggcaagttttgacatagcagaaatctctgaaatggtaccaatgccacctgcactagaagctgcttctcttgctcttcgttttctaaaagaatgtgagcgaaaagcagattgtatccgcgcagctgcctgagttacatttctgatagcagccaaggtatctttgagtgatgcctgatcctcactggcagtaagattttccttggagacactgttaacagtcatatctgcctgaagctcagcattacttttagataattcactctcttccagtgtaagcgatgacagatggcttgttacagctatctctgaaagataccctgccagtcccttgtgcccactgttggctgcaatagatgcagcagttttacccgttggatcttgtgcatttggatctgtcacagctccagcagatgctccagaagctataagtgaagcaaccattttttccctatatggaataacaaagcttcaggaaaataacatccaaaatactttaaaatggaacagataattataaaatggtttctgaagaaacaagacaactttcttgatacgatcatcagttccagcagatgactggatgaaccaatttcttttaattagaaataaaagtcagcagggggcgagccctgacacaacagtaaaattgtgccttggtgatggtcatggatttgaatctgaaaatagtctctttgcatatgcaagggtaaggctgggtacaatatcccttccctttaccttcgcatagtgaggagtttctgagccatggggtacgtagtcttttagtttttttttttagaaataaaagtcaacaactcggcatttgctttgaatgattaagcaatcatgctacatgtggttattataccctcagtgttgtcatcaatttctacttttgacttacagactaggcattcccgaaagccaattaacttaacctacagggattttaataatttcagaatttgaaaacacagtgtatttgatatcattttaaccgaacacatccttttcagtttttcttacatctatcctgcagtctgcatctccagaaatttaactttcagacttaaaaatctgaaacacttatctttttccttgcattttagtgctctatacctataataagagatcagatagtttattctcctttccttctccattttatctttccttgcttctgcattcccttctccaaatgaaaaaaaaaaattgcatacatattttaccaagcacattttgtctgtcaagtatgtatgctttccttatcttcattacctataagccttatatagcaatattaacatcattcaccaaaactaaataaatcagtaaacatagtagcaagctctctagagttctctattaccttccaaaacgtgcagcccaatgaagggcagtccacccattgatgtcacggaaatttatattgactccacaagtgagaatagggttcaaggcccactcaaaacctaacccagcaaccatgtgaataatcccttgctctttcttggacaaagagcagcctgtctcttcatctttttcctgagatctgcaagaaagccactgttgaagcttatcctttagaagctcttcaagaagccaatcaacagtaccagttgacgttccactgccaactagaagagcctctataatatggctccaagagtcatcatcagctttctgttttatgagaggaattccagattctatgttgtcattctttattgttgatgcagaaagaagcatttgctctaatctaacaagtaataacagctcttctggacttctagtggcttctgtttctgattgagtacatcgagtgcaactattggtcttatcacgatattcaaactctctgacctcactgcaggactcccggtttccagaagtaatgcacagagtaacctttccaggaaggtgggatggagcttcacaagagattacaccatcttgaattatctcaacaggaacttcaacatcaccaaacatacaagcccatgcagaatccgagggatgacagagaaaagacccaacaacaatgacctatgcatatggagctttaggaatcaaatttggacaaaatcaacactaaacatcattttttaagataagaaagatgaaaggaaaaaaaaaaaagagacaaaatttatgccccaacttgttaagtcttaaatgtccaaagacataagcttgagcaacatttccctaacctaattattataaatagactgagctttatatataattgcttcataccaccactaccacaagaatttcatatagatttcaagattttcaacaaagttaagaataaattttaaagctcttcaggaacctaggtaaggtataagcaccaatagttatgaatcaaaggaatgagcactttcattgtccacaagataccagttatgcaaagagaaataaatcattgcatagggtatgcaaggtgttgggctttaaaggcacaaaccttggtagtctcagtggcaaaaccccattctggggagattgtcttaattgtaaatttctgtttttgtgcaacagtcaagcttgaatttgcatctggaggtgctccaatttggctttggtcaaacaatgtttcatagtagtcagaattaattacttgtgtttccaccatagaagaataggcaggaaatttgacttcatcaacaccttgaggttgtgagaaaacagctgctaacatgggaggggaatcagaagttgaagaaacaccaaaatatgccaaaaatgttgtaagttaaccaggtgaaagtaaatcatacagttttcagaatgattactgttgaagttgagccactgactgttttcctggttggaaactggtacacttcttgcagaagatactgaaatttcctgctttaagaatcaaacattttaagtattgcagaaacacatgaagaaaattatttcaacatctgagaaaacataaaattgcaaaatgatataaattttattaaatatgtcgaagcaatacttacattttcaattggcatgtatacatttttctgtggtaacttgactgcagatgaggacttacatgattccagcacctctgtccataaagccttttcatttccatcagggtaaccatggtctattaattcctgataaaattcaccaccatcacctataacaacaaacacttttagcatcttttaccttcctctattcccatttgattttccataatgaagaggacaaaacaaactataaagggctgaatttcacttgaaattaaaaatataaagttaaaaaaaaggttttgaacagataataactaatttacaaggaaaaacttcaagcaaaggcaaaaccaccattttttatctagttggagttacagggcccatatgatataaacagaaacttcctttcgagcctcttgttgttgcaaccgggatttaccttattgagcgtgattttgagcccgaaatccattgtataagtatacttcgagactgttttagtattttccttgaatttttccttaaatttagtattttccttgtttaatttggatccttattcaggttggctatcaccatcctgtaagtatgttgtgttatattcttcatggcatcttttaaaataatatcacaaccttttctctcaaacttcaaattttcttgttattattaaaggttagtcaagtgctaacctgtcagccacatgcaatttatcaagactagaacatttgttttattttccttatcaaccatataaacgaagcaaaacacttcatttattatgtaacatatggaattttccactcaaaccttaacagcaagttccacattttgatatgtttttataaagtctactggggtaatgtcaaatacaaagaaacctagccgtgagtaagttgtttagaaccattttttttcctggttacttggcttataataagaatcgcatatttctcttaagattcatattgagaaaaacccaagtccaacattgactaaaataatgaataaaagtggggggacaactaccacctaatgagctagcttttggggttgaattagtctcaaacccaaattctaataattcacacaacgcaaccagcatataacaattagggaattatgtttcagtgagaaaaattaaacaaatacaccaaacaagaagatggctataatagttgtgaccaacttaatctaaacaggtatgctatgaatttccatcaacaaattacagaaaactagctgtgcaggtgtaagatgctgcaagcacatttagataagtagaagacagatatctgtaaaagtgaacatgttaaacacacgatagattaagcactcagatatttcactgacttaagccatgcgttctcaacagatcaagtttatttaatttaccttgcgtttcattatatccatcataaaatagtccttgatcatcaggtccagagaaagctgcagattgttcttgattgctgatcaccctttgatcgtgctgagggtttgaatcatgtgcagtttcaggctcactgccaaaggaaacaatatcttcaaagttgtcctcattcaaacttaactgcacctccaatcggcgcaaagcttgagtaacctcgagttcaggcgaggttcctgattctgtatctgtcccatccatgtgacccattttattgttcagtacgaatatatcagacgtaacttctgtagaccctggactggagaaactctgattaggttcatacgaatcgccaagtatggatgttgacactggattctgagtagaatatgggctaggactctgagtatatgcagaagaggaacttggtgataattgtgccccagctccagaactgagctttccctataacatgagagtgagtgcattaatgcaaaactcaaagatgggctgcacaacaatgttactatgcacacagagaataaaacaatataatttaataattccacccaagataccaaatatgattcttaagaagatttcaattttttattgaaggccttaagaaaatttaagtatatctttatttgaggcacaaagccatcaaatgaaataactagtgcataaaagcaacaggacattacaatctttggaataatcactgactttttcttataccaattgtccttatcatagagaattaactatatgggaggtgaggtgtaggcatctctgtaggtaatttctgcttggtagaagagcataaagagatgttcataaacatagggaatagaaaagtttcaagaagttaagagaatgcatggggaatgactttaattcatagttgaattgtgttgcacaataattattaaagggtctaatattcatgcaattagaaattattacaagtcaacaatgttaccatacatgacaatctacaatttggaatgcaatgtaaaaatcctttacactatcagtgcatactaaaattcattattaaatgactttggaagcatacatgtacatttataaatgaagtttgaaaatagaaaatgagagaggggagggggagagagggagttacaacacagtagtaattataatggtgaataaaagaatcagtacaccaaacttaaacaagaaatcttaacagctaatggacaattgcacaagccatctacaaaaagtaaatatgaaagaatacagaaaatgtttgaaatttcatggaacaggaaaatgaaccaaattatttgagtttcacaagtgaatagtaaacaggcaggatgtctgtaaaacaactaatccaaaacatgttcagacagtgagcaatcttgcacaaaaggattccccaaaattttctggagggacactatgcacaaactacaagtactattattatgtttatctgatatcatgtatcggagactcacctcacttgtgttcctataatgcacaagaacaatatgctcatatgccctgccatgaaacaatagtatgagtgataatgaatgactattacgataacatatatataagcatatcacacaaatagttatgtacatcgaaggctgattctgtttcaaagtctaggataaactaatctttgcaattcacttaaaatttagttagcctctaggatggctttttaccgaaaattgcatgtttgttttaaaggatacaacatgtagtgataagcttaataatatgaaggatatacagttagctaatagttaaaatttactcacggatccaacatccaatagctccgcctctggaaagtagggttctgctctccgtgtgcatagtaacaatttaaggcttcaacatttccaacctagtcatgcagattagtacaatcatttaaattgaagaaatcagtatacagaataccatcacaaagacaaatgttggcctacactcataaatatggcaacaataagtgaataatgttttgataacatgctaaaaaagaatcactaaacagaaataagttatatctaatgtatataaaggtcagttgataggcaaatcattcattatttcaaaagcatcgtgaaagacttcaatgaaacttccaataaggatttttaactatttttaataataccatctgtcaccattcaccaagtttgagacatctatcaaagatatgaatatattttttctaacagttcaggagagtcaacaattttccccctcttaaatattaatttatgaactgcatttctacaactgatacccctttagacacttgataacaaattttcctttttcatggacaactaataaacacaacagtatagacactactaacacaccttcagcctttcatgtgcttctcccacagttcttccatctcttttcttacgccagttatgaccatctttacggaagaaacgcaggactcttttgttaaacagaaacagagatccacctgttaagaagatcaattgataatgttaacaatcagcattttatggtcaattctgaagaaacaatgacaaaatctgtcatttatttttatttctaaaatcaattggataaagggaacacagatcttactggttggctgttgcgggggctcttgggtgaactggaacttttcatgattctgtaaaatgtacatcacttctgcaggcttcaaccatctggcttgagcctcttgatgcagatcattaatatcgtattcgtaacctaaaaccacaacataaataagtcaaaagatttagaacccttcccatcatcatcatcatttttttcttttcttccttcttatagcagaagaactagataagctggggacatttttatgctttaacaagaactgcacaacgtaactaacaacttaattttttttcttctctgtacggcaccaatgaattattccaatattccatatcatttggaagcaaaatgtgttaggggcagcaaaataattgagtaaattaaatcaaattgcaaaaagcatgctacagagaatatactaaaagtgctttactgtcagtgcgagtgtttgattttcaccgattccaaacaaattccaaaactcacatggtccctattgaaagcaccaacctcagaaaactaaacagaatgcacacacccaaagtcgcaagtgatgtggttcacttcaactactcaatgaaaccaagtcaaactcaattcacttcactatacatcgcaacaaaacattaaacatcccaattttccaataatacacccaagacataatgataacatcattaatcattaagaaaaagtaaagacacgtttaccaggtgtcatggtgttgaatccgaggaataaaagctacaagtagtagaaccggacacagagcattgttggagccgcagaggctgctagattcgctacggtgcgagttggttccgaagaataatggatcggagaaaggaagttgcaaaagcagaaagctgaaacagacgcagttggcgttagttgaagcttagcatagagttgatttgaggttgtgattaaggttaaggttatagcgaaacgtgcttttattaaacaactttttttttttttattaacacaagttggggaccccgaccaagaccaagaccaagagatattactattagattgctactactatgtcttgcttttctcacctctttaatttaattttagaatattaaagactttacattaaagtgattaaaaaaaagactttgcaagttggagcaagtgtgatttttctaagcggtaatcacaatctggtagtccttttataatttaataaatgtgtagtagtattatacacaatttacttttttgttaactttgctaactaccctcttaaatatttaaagaaatatcaaaagacgaaataaatatttgattacgcaattaaaagtgtgattagactatagagattaacaaaatattataaatagttctactcttcgattataattgtctttattttaaatattttcattttttaccttaataaaatatttaatgtataaatgagccaaggtgtttttaagcgatatgcaagtactgcataaaaaaaagcgagatatgcaaggcgaacacattcactaattgagtggatgatcaataaatcaaaagtttcgtcatgcatattttaataatatagcatgccataattaaaaatttaattaatataaaaatatttaacgtggataatacattgaaattaaactttcattataaatttagaaaatgacgctcatgaatatcgggaaaaaaaagaaaaaaaatgccgctcatataattattgcgcgcgtaaatttcgccacaaactaatgattcaactgtaaacgtgactttttctttttggtacaaaactgtaaaacgaacagaaatgttttttttttttttttggtagtgnnnnnnnnnnnnnnnnnnnnnnnnnnnnnnnnnnnnnnnnnnnnnnnnnnnnnnnnnnnnnnnnnnnnnnnnnnnnnnnnnnnnnnnnnnnnaagaaaaaagttatattatgataaatttatgatttgataaaaagaaaaaaagaaaagatattaatagagtatttaaataaaaaataatttgtatatcattatttttttccaagcgataatgataatattttattcctgaatgaatatgaatctgtgacttaaattttctaaataatgaaaaagagtactgaaacatacccaaacagttgttcgtcactactattgcgattcaaatgtgaacaaaaggaaaataattccttccagaaattcacaatttttcttacagtatcttttttagtagtatacatatactacatgtatttaggtccaattaattataatatcaataaaaaaacaaaatgtaaaatataaaatgtgagcaaaaggaaaatacttccttctagaaattcacatttttgttacagtatattttttagtggtatacatatactacatgtagttaggtgaaattaattattaataaaaaaataaaatgtgaaatataaaatgtagtgtgaaattgtgaatgaggtgagtgggttgaatatctcttgggcaacctgattagcaatgatatcatcataaaggaagacctggtcatcattattaaacacaaaagacaagtttgtactgtgtgaacgagggttgaagttcaggattaatttcaggtaggtgaaaacttattagaagtattaggcgtttgagttgatatattgactttcaataaataaataaaaaagacattgacttcatcaacatttcaaaacaaacaatttcaacgtatgttattcattaatctcattttatttgttatatatggtacatgtttgagaaatgctagcagatttatgagaaaatatttaaaataacttatcattttaatcatattttaaattcttttcagttattttgaaaagctgaaacagatgagaagttatgattatttcacgagaaaattgcaacataagtgtgtgaattaaattaatttgagagggtatggttcaagaagcatgtggcatttaatcaattaatgtcatttcctcacgaaatacttggggaacaagaggtgaatttcaggtccctgatgacacgaacgagagagaaagtgtgtgtatggagtacacgtgtttgattcaaagccatgttaattggtgaacttagataagaaaactggataatctttggggaagataaagtcatacatacttgtccatttgttttaaattctttccatcgtgggaataaattattccaaacgttttacatatgttgtgcatatgggatgttatttttcagagtatggtagtattttatttgctattataaatttaatagaaataaataaatattcattatgaaaatagtatttaagtatcattaacaacttgagtcttgagcattaatatatctctgattaagacctgattgttttaaaactaaatagaattaatttaaataaatttatttaaattcgttaagtgtaattaaaatgtttacttaaattaattttaattttaaatttaccttcgagcatattcttttccatctctattaataaactaaaatgcaactcttgatataagaagttttccatgagtaattgctcttactttaactgggtaattgggtcgagatcaaagtcgagttttcttcccacaagcataatgtaaattgtaggatagatatagtaaattagtaatattattgtttacttaaaagcacaaaatataacactataagaaatttattattttggggcaattttacgtcctcaaattgatatgggattcggggcgtgcaaaatcccaattgtcctctaactcggcttaacctaaagttgatttgtacaggtttgaattttaaaaattagatctgttatattttagggatgagttcggattaagcttcaggccatcttaacctgatcttaatgtcttattttttttaatattttttaaacaaatatatattattaatattttttattaaatggataacattttgtataacatgatgttatatttataaaattattatttattttaaaatgtatattgtaaaatatatcttaatttaagggttttttttcttcctttttttcattcttagattcagctatatattaagattgatatattatatattttttattttgagattcaactatacaaattgttaagattcatatatattacgataataataagtcaggtcaatctgatcttctctttaatttatcaagttttggtcgagttagatttgagtttaagtaaatgatctgaacaaattttaagttggataagaacaaaaataaacatctcttaacccgttttactctcacccttgtatgtgagaattttgacaattgctgtaattacattagccagaagtcaatttatgacaattttaggattcctgtaacctgttttaaaactcttctatttgtgatgattgtgttgtgaaggtttaaaccttctttgtttgtggaggttgaaaatcctcttctatttgtagcagtattttcgaggaggattttaagttttagtttcctctatttgggatgagttaatttttaattttttccttttccatttatagtattttttaaaaatattttttcgaagatttaccctccttttaattgtcacaatttttgaaactttttcaccccttaaatttgaaccaaattgtaatttttttaaatgcataacattcttcaaattgtaattacttaaataatatgaaaattttcattattataactatagcaacaaacgtaattcaaacagtaacattaaagataaattatcattcattgtaagttttactttataactttttctttacctcactttataattaacttaaaatccacaataacataaaatggtttcacaataaatgtaaataattgtatgtaaaaagcacactacagaatcctcttgcattcaattaactaattcgcagcattacttggctgaaattataaaagaaaaatacttagttgaactaattaaattaacaagacacaagttaacgttcacatatatgatcaaataccatccaatcactaaatttatttaatggtttttcaagtcttagattagggatcctaactagtataactatgaaaccaattaaccctgattttgtaggacacgtccgaactgaatattaaaatcccaaaaccatatataatagtggcctctaattccttgcttcagaaccacataatcggcggaaggtgaagcacccaattgtaattagcatgggaagcaagttatccttaatccaaatccaagtccaatatcaaagcatatacaatcacatgcacgatagcagtgaatccacagtaacttaagccccaaaaactcctctcacaccatctttgtccccccacaatcatttccaacattgattgcatttatatgcaacgtccatccatgaatcccccacaacacaagcttagttagcattctgtgagtgtgcttcactctaattaacacaacacagacacaaacacagggtatacagccttaacagtagagtagtactagctggaaaacatgtcggattggggtccagtgtttgtgtcgttggtgctgttcgtgctcttaacaccagggttgctgtttcaggtaccagggaggtcaagggtggtggagtttgggaactttcaaacaagtggtgctgccatactcattcactccctcctctactttgctctcatatgtgtcttcttgctggctgttaggattcacttgtacctcggatagttcactttcaacctcatcaatggtggggaaatcatttttctttttcatttttgttgggattattcaattcagtcatgtttctgttctgttctgctttgttattcccgttcttattgcgtgttgaaataacaacggggctttcatcatgtgattgtatttttttttttcttgttcttgacaccgagcttggtcagatgttgtgcctgtattcagttttcctctgaatgaatgccagtacttgattttatactcaattgcattttagatatctgaactgaaaattcaaacctgtataagctttgcatcttcatgtatgtatgcgtttcagttgacgtagaatatgttaatttcggattaatttacggcatttgttcaattcaactcgaggcttgatttgatttggtgtaacgcgggaaaagaataaaaggtgcggcactttgcagaataagtgaataaccaaccactcgtgacacagtttattttattctccccttgaataattgtgaatctgtaaaccctgaatattaaacatcttgcataaattttcaaatgaatgaatcgtctggagcttatatgagagttgatttaattgtgctgattatgacagaatatttttgagatatcaacaaacaaacaagatgtaattccatttaccgataatatttttcacttcgtccaagtatgatcttagtgcagttaaattaggtatatgaatttatatatatttcttaaaaggttttattaatatacacgttgttttagtctcagttttttaataaactataattagaaaaatattttaaaatacataatggtataaatactaaaaaataaagatatatactttaataaatatttgtgaaaattatgaatgtagacactcttatttcttaatatgaatgtgtcaacaaattataaccaaaaaatattatagtttgttaacgcaatcataaaaaaataaaaatgtgtaggttagcaaatttccttcttaaaatttatatgtattttttgattttatttatttataattaaagtaaatgtagctctctaatccgatataaaggtaggctcaggcattaatttaagaacccctggaaaaatacgagttgggccggtctattaaatttgacactgtggttaagaaggttcagacaagacacacagcccaatttaccagctccgttaatcatgaacaatattcataacacagtcgaagttggaagcttaatttatggcactggagcccaaccaaccagcggaggataccaatactacttagaaaaacttttatcagactctcctcccttcctccgcagtaaaaaacaatttggagtgatattttcctgattaataatacgtaaattagtttccatataatttaatgataaatttatccgagaactttacaatttaatatcaaaatagattcttaaaaaatacaatttattatcaaattgattattgaatattataacttaatcataaaataatcttacaaatttaagaatcgaacttatttatcgtactttgcacatttaatgattaaattgtatatttcatcttttaaatactaatttatcacaggatcatactttcataacaaatttaattatttacttataaatctacgaggaaaacattggaaatacattattcgacatgctttttaatatattttgttattggataaaattttacagacattttttattatatatattagttggattcacaatgacatttgtggtattgaaacaaataaaaaatattttgttaatatttcccattgaagaatctcatacaaaacgaatgacagttgaaacaagaactaataggtcttttgctttgttcgtttcttttcctatgtatatataaaaaaattcatcgcgagaactattcctatcctaccttgataactgatatggatgttgaatagaatttgcctttactagaatatatttgtaatcctaaaccaaaaaatacacataaaaaaaaatcaaatttattatctcttttctctctcatttttaacaatttttttaaaaaagataatcttccaagtaacaatatatactactttctttttaattgttaacttttaactaaaataaaatctgataaaaaagcaaacaacaaatttgatcaacatattaacaaggaaaaaaattgttccatatctttttgcggttatacactctattagcaataatacgagaaatgcgacaggcgattgaaaaaaagagattaaaagaatgacgtatgtgatggaaaaaaaatcgaaagtattggatagtagaatatcgtagttgtataaagaatctctctagaaaacttctccttaacgaaaagtaatgcgagattcaagatgcgctgacaagttatgctctagattgcatcaacctacaaggcatagttgatgctaattttttggttgtcaattataccttgcttctttgctccactttcctcagtcatgcaattgcctcagacccagatcagaatcatttttcaatttcctatttaataagcttagcttatagatgatcatcacacagcatttaattcattgaaaactgggacatctgtgaagtagtgatcactatctaaaactagttactatatttgttgtaaaacaagtagtaatttctgcagggtgtgatggcatcagattggggtccagtggtgatatcagtagtgttgtttgtgcttttaagcccagggttgctgtttcagcttcctgctaagggcaaggtggtggcatttgggaacatgcaaactagtggcttatctatcttagtccacaccatcatcttctttggactcatcaccatctttctacttgccattggtgtgcatatttactctggataatcaatcatcccatagcaatgatgtaccgctatatgttgttttattctctacggttggtgtttttctttttgttcttttttattctggtttaaattattttgttgtaatgtaacttttaagatgtgatcaaggatggatgacttaattaatttcttctttcatttctctctcatggaatattgatctgtgtgatgtgcttctctttgctcatttatgtagaagaatatatgaatcttcaaagttttagagacaagggtaaaaacaacatcttatagttatatcgtggaggactggtagtaacacacttttatactttgtctctgcatgcgtatggtcgtatgcttgtgtgtataggaggggtaggatgtaatgtaagatgtcgcggtattaaaaaaaattaaagagctaggtacaatattggataagagttaggatcaattccttagttgcgtcttgtttgtgttttcttttggctgtctcgaattgttctatgaaagttaggcatttagaggtttacttgtaacggaatgctaaagttttgatgctaacagattcctataaacgaagtatgaaacggttaacatgttgattagagtttgaattttaatcacgtgtatgaaaaaaaattaagaggaaaagtttattttaattatcttttatatcacacaccgaaaaagataatctccaatgatacccttgagtaaaagaatggagtcgtggtaggaggggggaatcaactagtccctagctatgcttgtttaggcaaattttgggaagaaagggtattgaacgaaccattttggtgagacgatatcattttctgttgtttgatggacacaaaaaaggtagtgactgattaaaaccgtgtgggtctaacataacattctatgctactatgcaagggacaacgccaaaaatacaacatgtaaaacacagtgaactttcacctcatttccttcgtcccatcatgtgtaaaactatatataattattcatttttctccaattttgcttttcaattcgatcaaacaaagaaatatttcccctcttattttcttttcattttctttatctaaacaatgtaaatttctttccattatatctttgattattcttctttcgattccttctgtccttcactttctttcctcatccagaaggtcatatttaagaatcacagtatctggcaacagggaccttgcattcaagcatacttattaatatcggatagtggcgcgtaccaatcacccttaaaaaatgctatagctctatagcggatagcgctacatcgctatagcaaagtatataagtaaacattattctgaaatctgaattatatatataaattataaacaacataatccccccccaaaaaatgacataaatatcaaacatttgcataatgcagataatatagaaaattataagtaaaaaaataaaatagtccaataataaattaatgaacaataaaaaaacaaaaaataattagactagaagaaaaaagtaataaatagaccggaagaaaaaacaaatatatgaatatactttatataataaaaaacaaatagaaaaaaatttattgataaaataaaaatataatataaaattgataaaataaaatataatgtaaaactaactagcttaggagagttgaatgctttgaaagaggagaggagagtttctgcctgtaggcatggcaacttgacccgcacccgtgggcatccgtccgaacccgccccaatgtcaacggaaaaaaatcgagttgaccggtttcgggttcgggttcgggttcgatttttccctgcctgttgaattcgggggcagggacgattttgataatgctgataaccgccctgcccccgccatgctatatttaattatttataaaaatacttttatatatgtggaataccttgggataaagacttagttttattcaagaattaggagtataactaattttattttccagcaatgaacatctaatgttgaaattttattgtaattacatgcatttgagacttagcgcgatcaaattttatgttatgattgttgtttaaaattaattttttaatagtaatttttaagtgttcagggacaaggacggggtcattttttttagccccaccggttttcgggggcggggcccccaacccgccccgttgccatgcctatctgcgtgtacttgcttaagctagtctatgtgtttatcaagtattataaaggagagtttatgtcttaaaaaaaggagagtttttatattagacttatttactagtactaataattacgggaggagaaaggaagcttggagaatttttataatcactacttacaagccaatatttacatttttatttttaaattttaatagtggcaccaataaaaaaaaaaaacaaacagcacgacacgagtacagaagtgcactgacacctgatgcttttgttttaccttttatgaggcttgaccaatagcaaaatggcagcagctgacgctttcacttcatcttcctcaatgggcctcattccgtttcgtctagcccgtgcttcctcaacacaccgcaccacacccgctttttctgccacacccacccgcgatagtggcagctatcgccactttctcatttgctctattgtggtgcagtctatgttgatcgactgccgcaccgcaccgctatttcagtattgcgcgcaataacgccactattgataactgtacattcaagtactgaatttgaaattttttcccaacttgaaaatattttatttgaagcaattctattaataaaaactgcagattttccccatttacatttctttccaaaacttatattcaccctaactaaggttccacttgatttataggcaaccaaataaataatatgggaatggaattctaaaacaagtaaaaattagtttagccttagttcaactcaagcgaggcataactctgtcctcagtttatatatataattaccaataagagaaccgtggtctcgtgagtcatcagatcatattttccctttcattttatagtatatatagtcatataccatgtttggaaatggcaaataaaaaaaaaaaaggaaaatcagaagcctatataattcaaattttacaaaagatatataaaaataaatacaataattgacatcaaaagacagtagctgggaacaagtcctcaattcttggtgctggctaattgtaataaaaagagaagccatatccacaaaagcctgatattcatgactcctgcttctagtgagagaagttcagtaatcttcattgttctatgggcagcatgagcaggcaggcacaaaaccagtatagtactggtcaattcgattatttatcttttcatataattttccactctgaaacagcaagaaattgtaatgaagttcttaggctcgtgatccaaccaaaaagaatgagataatcaaagacataagctttgcggttaagtcaaaataaacagcagaaatgggaactccaaactggctaatatcgaaatttagttacaagatattgtacaccacacaaatataatatttctacaaaagactaaaatgtaatttgcttttcgaattggaggctattacctgtagtttatatggattatgtatcaaagccaagcaatggtagaatttgccaatttagcctaaaaaaaggtagaatttgctaacttagccagcctcaagcaacattaatatacccggcttcaatcatttctcaacaggaatatacaaaaccagcgggaagcgggtgcaaattttgtattttatacttctaaaacaaaaccaatcttgcagatccaacccttaattgaaaaagaatttcacattttattttttggattcatcaaaggccatacaccaagatagtcataatctatcttattctcaaaattttcactatactagtagctcccaatagaattttgaccaaactttataatgaagtatgaaattcttaatagtatgaaaatctgtttcaaaaagaaaactacaaccatcaataatgactgagcaaaacaaccacaaagaacattatttttcaaacaactagcctgctaacatcctgttaaaaaagggtaatagcaaattcagcacctacatcatactgaattgcagcctatctatctgtgatatgggttttgccaattccccgatagatgtggcttaataagtttaagtttaaatatcttatggcttgcaggtgcatatatctatgcaacaaaaattatcccaaaaattccttactagcttttaaactaattatctcaaaatttcagcaaatctcaatgcatgtagcaggtgcatatacaggaaaccaaacagacatatgataagcttgtgaagagatgtgatgggcaaaagaggtttattaattgataagctcgtgaatcgtttttaatgcactttttacgtgcatataggtcatgtttaggatcatttgtctcaaattttcagcaagataacagtttttcttttaaaaaattctttcaacaagattaaaatataacaattatttcttcaaaacaagttaatctaacacgcaagtcttccaaacactaccctagaaatggacctgagtagtctatactagatgttaggttcaaatttcattaccaactatagttaaaaaatagagcaaaaagcaacaatttttaacaatttttatctatccaaatatttctcaaagatctcccttcctctaaatatttggtaaaagtggatgaatattggaggggtagaaaaggaaaaagacaataaacaacagagaaacttccttttgggtcccacaacacaaacaagagatcagatagataaacacaatgattgccaaaaacacgtaacttatccccaatacacacaccatcaaatctggacaatatccatcttcaattttcttcagattctaacaatggtagattaaaaaacaaaacctaaatttctgcaacaaataattaagcaacatctcaaagttttaattttttgggtttcttaccagggagatccttacgtggcgtagcgtaacagagaatagaacgccccagaacggagagagaggaaacgacgccagcgacataaaacaccataaccaatccgagaacccacggcatcagcatgaacccgatgaagaaagtcaccgatccacacagcatcagcgccaccgaaatccctagtagtagcgacgcgaaacccgccggagtaatctgcgcccccgccggagaacgcctcgccggcggctccggaacgatcggcggtgaccggagaaggttgaagaccagagccgagagctcgcagaaaaccctagattgttgatcttcctgtcctctcatggtgtctttgtatcagggaaagaaggaaaagatgtagcaataataataatagggagaatttaaacgaagagcaataggataaaacggagggagatggaaattaaacgtgttgtcgttctaaggaaataaggaaatggaagtatttgcagaaagaaagatggaaatgaattatgtttgcatttggggagtcgcgttgcaagtaatgacacgttgtcgttttgcgtaagattaaagacgcagaagcagaatagaaaagttgaagaaaagagaaagtgataaatgagagaagatgggttgcgttgaagagaaaaagtgttgcgtgacgttaggattttggttttgagggatgggatgtgatgtggttgaatcatccaagttgacataaatgaagtggtacacgtcgcacgaccaattaggaagataatagagggctactattgtaattatattttattttcaactaacgacggttgaatgggtcagttttacccgttttggcccatcctattattagttcacacaaatcatgactaagggtaagttaaccagtttagtctgacaaataaataaaaaggagaactgaagaataattataaataaaaatgattcataaatcagtattgcttcctaaatataatactattctttccataataaaattaagtacaaatccaaaactctacactattctttttgttttcttattaaaaaattattgggccaatgaactagttcctgcttagttaaaagccaattttttttttgttgggtaaaaacaggctaatgaattgatatctctgtctcaatccttataagaaagtaggttaacgataagtcaaatttgttttgcaacccatatactcatgtgagtaaaatttaagcacttatatctttcttttttttttaatatatacgggaaaaaaatgcccaaagaaaaactataaagcaactagaggaggaaaacaaatttctctagcatcgttcaacaatgaagggtaatgctcaagaatcaccaagtctatcctctctgtataagcataatcagtaagcttgtccgcacatatatatttttatatatttatgtgagtaaaattcaagcactcatacctttgcatgtcacatatatattttgatcaatttaaatatattctttgctataatttatttgaaagtaataaaatatgaatattattatacttttaatattaataatgaaaaactaataaaaggaacattaaatacaaataaaatacataacttaaataaaacatattactaatttaatcttaattgtaaaaatattacaaataattttattgacttaattataaaatatttttagaactttcaatttgtttttataaaccataataaactcttacaaatacttactttatttaaacgggaacttttttaatgaataaatgctctaccaatgatagttttcataaatacttagcatcaaaacccaactgccaccatgcttatcacgccttggaggtagggcacacaagctgggaaataataaattgtgtgggacctcatggattttttaatatcaacttttttgtttgttgctgggcattatttaatacattaattattggcatatatcctatcaccggttttcatttttattttatgtttacattttcttagttaaatttattaaaaattataaaaataaattcacatttaatgaatttctctctcactattataatttttaattaatagaatgtttaaaagtaatattagaaaatattcttaacacttgcggtgagatattaatttctcaggagccgattaaacaaaattaactaattttttactaagaaatttaatttttaaacaaattataaaatttagttaaatcacatttttttaaaagcaccctaaatttgatattaagaataaaaataaattattaaaaataaaagctcaattaattgaagggtagttttagaacaataacattaaaatatgataaaaataattaaattttattatatttgagtccattgaaccttttttggttgtttataattaagtttgaaggaaatatacttatgggagtgggattaaattatttaaacaaaaaattagtaaaattatttaactaaaaatagcacttcatttgctaaattttagtatgcatgttatttgagataatattaaattgttaataatcaaattattcttaacataccatgatgcctatctaattccgggcagatgtgaccccgatccatatgctactttgattttactatgcgagtttcataattcagttgcacatgattaattattattgctacataattcataattggagtatgcggggaactggttcgctgatacgcacaaaatttattgtgtcctaaatagaaaatggtggtggtagcagctcaaagtgctgtccaatttttaatatttgttattattcctttctgaatatattatcaccgtcaagatcatgttactttcattgctgttggagtgttggtaacgtacattacaggaaattgactaaactgttgactttggcattgcttaacttaattgacatttgatatgatattcttcttgtcccgttatatcgtctaataacctccagaacagattgaattaatattataataccatcccttactttcaccgtgaactgttcccatatcttagctttatgagacttataataccatatcaatattatcgcggaaagagccttatttttttaggatatatatatatatatatatatatatatatataacttattatgccggaaattaaagcatatggtatataatgtcacttattataatttaattaggcacagactagtagctgaagcaaacttccccatggcaacacattatgtttaagagcttctctagatgctccatgtttcaaccagaatagaaataacagaaggcaagtagctaaaccatggcatagttccctatgcatgtattaagcacacaattgcaaaatatccacagtggtggctttcagctgcatttacaaaccagggagcagattatgcgtcacccgatctgtttgatcatattcaatataccgtgtcaccacgttattcaagtcatcagcttttttcagtgcctcaatctgcaacaggtgaaaaactattattgatagaaattggaatgtctataatagttttattgggataaagagtatgttcactgttataatctataaattgcagctcgaatgggctcaccaactggtccgataactagtttaaattagcataagataacgacttaaataagttttagaaaggatttaacattttttttattcgtagataatcgaagataaataccaaaaattacaacaatttatgcatcatgttcaacaaactaaattagagtccctgagtaaaaagtatttaatataaattttagtctaaaattccgtatgctttttttgttacaacagaatgtataagattcctccagggttttttggtgtataatgacaataatgaggatcaaatctaagtttttgcatatctatcccaacctctacctctaggccaatcatagtggtcttatgagtgtcatttaaatgcataaatttttaggttgtattcagccttaattaatattgcctttctatttatttataccgagttcaagaatcgagttaaaaaaagtgtgttcaccacatagaatgatagtattgacagataacttgaagtgcatgactttgtatacatttttacctgtttcttcaaaagctcattttcatttctcaagatatgttcctgtttgaagcagcaaaaagtgttaaaaaagaaagaaaaaaaggttaacaaaccataattgaactttgatccactgtttatcattcttaatcgaccttgtttgatattcagacaaaaaggaaacagtccaattatgtaatgcagacgaatgtgtggaaataaataaacacggttcttcacattatccggtatattgtttagaatatttctaattataatttgtctctaataaagtggcatgttaatgatacaaattgcaaagtatcttttttgatcctgaaattgcaaaatatctatatgtgattatgaatatcttggaactttagtgtcgtgtctggtactctggtgtgtgttagtaccatcagtttgtatggatatagggcgccctgaaactcaatatatatatatatatatatatatatatatatattcatactttaatgtgaataaattttaattgccatactcaatatgaggaatttgaattattctacatctaaaatttgaggcgttgtgcatagcaccttgatattaaacgtgtcctggacataatttgctagtatgatgaatgatgattagttctatccaactagtcaacctaacaacttaacttatccttaagtttatagttcagattaaagcaggggagggtggggagtggtgatccatccatataagtggttatcaaacatacaaaatcgagaaactcttaccaactgcatacctttttcttaagattcactacagattccatcatcaatcgcatctgcataaaaaacttctgcattagaacagtcttaaatgtaaaaaggtggagctaatgaggacaactgcatcgtcaattgaaattttaaaatttgttgctctggccgcaattgccatgagtcaaaagtcacagggaaatcttcatcagataaacttcggtagttcaagagagaatgagttttctaaaatagacctttagttaacacttaacaacaaaaagaacttaggcaaacgtaaataccgcaaattgagcttgcaacagaatggcgatactagtaatctcatacgcaaacaggatgatatacaacaccatcactagaatggaagggatcttcatagtataaacatttcacgcccagaataattggttctaaatgatagtgatttgaacagagaaaataacaaaattaagcagttaaaaataccagaatttattttgatatatatctcaagcacgacactagagcaaagcctttttgccttgaagtaaagataaataataagctcaccttattctgtaaaaaaaaaagaatgtttttgttaagaagggggaggtctaatatctgtttgggaagaagttaggtaaaagtgcaggcgaagcggcctgggaagaattaagcttaggatgaagtagtcccctccggtatttggagccatcagagttgaaattataggacaagttaaatactctcaactttcattcaaggatgaagaatgcagtacaacagttgaaaacttgacaactagttagttgaaatagggtttgataccttgctaagaaacctactcacctcacagcttaaactgtcatataaagctattgcatgcccgagcaaagtttgccgctagagttggtaagaccccggcaaaaactgattctataaatccacaacctggcttgaagattatttccttgactctagtctaggatacaaattataggtctcctgttaataaaaataaccagaattctaaatagataaacatggacacaagatttaaccaggatcaccaagtatgtcctcgggactagagcagttgtttctattattgattagaacaaatagggttacatcaattatatagaataaatcacgatatagatttgcaatatcaccccaatattgtattggggagggggggtgggggtcaatccataacgcattacaaagtgagatcaacttcctattgttggatttggcaacatctaactccacccatccctatccctgcacaatgtcatccatcctggctaataatgttatctccatacatcagcgtactcaagatttgaattttgtagtaaccttttttcgttttcacttatttcaagaacttggcatggggaggatgattggacttgctaaagagtagggtgagttatacttcttgcaacacatgaaggttgatggtggtaccaacaaaaaggtgtagtcttcaagccaataggcaaatttcgagacttgaacatctgccaaaatctggcttccccacaagtgtcttggacatccaccatttagaatgccgagtctttatttactcatttgtttataaaagagtcagtcgggtgttttgaaaacaccatcgtgcaacatttcttcctaataacaataaaagtcttgcaccttttcaccttgttcattatgattacattcattaatgattgtacttgtgtgacatggacatttcttatgaaaagtaaatctaaagtttgtcgatttctttcgtcttgataaaatttaattttgaaagcctattaagagtttcggtttgacaatggtacaaaatatgacaatctaatgttaagttcaattgtctgagcttgaggtgcgtatccttgaaagtattactgatgacatgtgcattgctttgagaaaaggaaaaaagatcgtttaccaggtatcctatttctcagtttgtttgtactgaccatctctctgcatcgtatcagagttttattgcaacaattgatgcaatcaaaactcttacttcagtccaagaagctctgaaatatgagtgggttcaagccatgaatagagagataaggacattcgaaagaaactcaacctaggagatagttgacaaaccaaaagataagaaggcagcgggatgtaggtggaaatacactgatgtatcaattgagcaaaaccacaagattggaagtgaagaaagtctagtagtagaaaagtcccaataccaaagattgatggggaagctaatttatttatcctacattagaccagataatgagtctgtttggatacaagctataaatatttttgaaaacttatctattggaaatgtagaattttttatcaagtaaaaaagctgtaaaaaagacttttagccttatctccagataggatcattgctaatgttattaatgtggtcatccaatttatgcatgatccctgtgaaaggcacctgcaggaagttgatagaatccttcaatattcaagaaaaggattgttgttcaagaaaaaagtacgttcatacattatccatagaggttatatagatgcagactatgacgagttagttgtaaataaaaggtcctcgtctggatactgcatgtttctaggaggaaactagtaacagggaggagcaagaaacaaaatgtagttgctcaatttagtacataaacaaaatttcaagttatgacacacaatatatgttttttcttatataggtaaatgttattggatataggggaagcatcatgaagagtgaaagactttgatttaaaaatgtgttttaagctttcaacatgcttgaagtgtcttgaagttttgtaaatgaatcaagtataagagaaagataatatgttgattcttgcattatattcattcatccattaacaagcttaaatggttttcattaaaacatcaaagtttttatctttttggttaaggattcaatctgattaaaagatttttggaaaaatgattttttactgttttaatcaattacttgatggtataatcgattattttgttcctgattcaatctggaaaaacttcatgaataacttaatcgattacttatcggattaatcgattatttggcctttgagtgaaactgaactgctttgttaaatgttttaatcgattactgacatagtgtaatcgattacatagttgaaaacaaattttaagtttgcctggaataatcgattaccatcatctgtaatcgattacatagttcattttgaaaatcctaattttctgacttaatcgattatcaaaacttgtaatcgattacacagttcattttgtgaaactgaactttttgccttaatcgattacagctcgatttaatcgattattttgctcgttgttgaaacccagaaatcttcttgaacattttaatcaattaagtgataatttaatcgattacataagcgttttaatcgattatctggcgcatttaatcgattagagttagttacaaaatctgttataaataaatttgaaggcttgacttgttttctaacttgaccatttcgtatttctgagtatacacaagccttctaagtctttcaaagtgattttctaggttctattactttttgcttcattcaaaacattcatgggtctttgaatgattcttgagcaagaaacttttcaaggttaaggaaaaatatgttctgattttgtttgctattcaacctgacttagtaacttatgtgcattatattcattagatcatcaggttgtctctctccttaatctttgtttgtaaattcgttttgaatttctgttgtaattgactattgtaagtgggttctttttgcttgggtctagagaatggttctctagctaaagaacaaagtagtgttatctggttcttcctctttagaagtctaatagagttttagatttctattctttatctagtgttggtaaagggaggttttgtaaaagtttgtaagaacaaaaatttataatagtgaaactctaattcagtgtgaattaaaagaaattggatgtagcttctgttgtgaagtgaaccagtataaattgcatgtgtttttgtttctctatctctattactcatcttgttcattgattctttgattcatattcattgtccaacaagttctgttttgaacaattgatttttagggactgagttatttgattgagtaaaaatatttcttatttttgaaagtgataaagattctaaactctaatttgaattaattttaaaataccaacattttaatcaattcaccccctcttgtttattgtaagtattcctattattttcaaatgttagttttattagtagataaaatcaaatgttaattttcttaaccatctaattcaccttatatttccaacacaatatatatgtgagaggtaatggatgaagattattcttgatgacctctcaaagtacaataggaaggacttataaggctgttttgtggtaacaattcagttattagtatggcccataattcaagctagcattacagaacaaagaacacagaaattgataagtacttcatcgaagaaaaaatggacaacaatctttagtcacaacaaatgagactccaattcatagacgtgttcaccaaggggcttcctttaacaagattttagaaacttattggcaagttggatatgattggtatacatttaccaatttgagggaaagtattaatacaattgacatttaagagagaaaaaattatcttttaatttatcttgtaatttatttatttttatatattttagtttatcttttgatttatttatatatatatatatatataaatacacatattataacccataatattgaataaataaacaatttcttctctttcatctatattcagcgtttttgtccggtgaaatgggggctagcttgttttattgttaagagaagcctcaacaataaagtgaataatgtctcttaatgcatacacttcttgtcctgatctaattaagacggtagaataaaacttagaaagaactcgggggtgattgaagtatcttgcattcaaacgtataagaaaataatagaaattatctgtgcaccggtgacaaagaaaagtaatgaatcactactaactgccttcgggacttgacaagtgtacactgtctaattactaggccatataatataaatgctataaacttgtactaaaagtataagcttaaattatctggtagagttccaagaaagtttcatagaaattttaatcaatcctccctccggtaaatatccctacaggattttttttcattgatgcaatgttcaaaactcaaatgatatttgctatctaaagtgctttattcgttttaagaaacccagaggataaagaagatatgcttgcatgacattcttagaacaatagcttttttttttttttttcattgccaaagctgagtgatgtatagtttacacttaataaattgaaattcgttcactgaatagagtgtttaacctttgctgatctgattcgcgaaagatcagaacgaaccactttctctagttccataaggtcagtcacactcagatgctcaagttcagaaacaccaaaatgcctgcaatgaaatttaattagatcagtgattcgttcataccttaacgttgcagaaagaagaatgcaaagaatcacctttgcaccacttgagaaaacgctgcaccagaccagatatctgcaatttcaaagcggagtccctgctaccaaataataattataatatcaataatctcggttgtgatatgtttttccaagcgtcagttcaacatttttcataatttgcttcaaataattcccctaaaacaacaatattttatgtatcactttcttttgctctgtcattttttagacaaaaagaaattaaaaatacaagcttggcgaagctaagcataataaagcatattttcatttgaagtgaaagcgagcgagagagagagagaacctgagataaaagcaacaaaacttgaatatgcaagttttgctgtattgagaactttacctttattgtaacattaagaaatataatatcgacacccctagctttcatattgaaattctcctacttatttagttcccatgttagccacactatctatatgataccttgacaatattaagtgctctcttcatccttgttaccttgcaactgttacgagacagttcagctcttatatatgtttacagtgataactttcaagatgttcttatggcagctacggttagattttcttactctatcatgtcttgtatgagaagtgcaatatatctagcatacatgaaaagttccgtacctttgtgtcagtaccgcttgctcctaaatgatcccaatatcgctgcacaacctcggccaaactgagaacattaaattcacggatttttcattctaatattgaaataactaaacaacaacaaacgcatgatatttgataggcttgggtgcaagtagcttaacaggtcttttttctagccagggatatgtttctgcgtttggattaactttcaattatgtcaatatcaattctaaaatcaagttaaagccaaagcaacaaatagttgcttcaactttttcaattttccaccatgattttgagggtcaaaattggttctaggaggtatttaaacacactagtagttaaaaaattaatattagtgtgcgtacaaaaatgggatgaatgaaaataataaatttaaggggaggggaggtcatcccatctcattgcagtctatgataagctttagcaattgtttacctagggagactatacacctggtcctttcaggcatgggttttagttcatattaactaaaacaacctcataaacataaaatgaatgtttagtagaagtattaaaaagaacattagggttaatcatattggtgttatgttagtagttttaatggacaggacttgtattagttttattattgcttaacctaattaatatggtagaataaatatgtgttaagtttgcatcaaatatatacatctgttttttttgttttttttttttacagaatgtacatatctatcatatcgtatgtactcaatgatctttcttatttgattctttcaatttcaccatcttattgtagtgatatcatcctccaatcacaatctaatctatctcaacttctgcggccaattaagtaccaaagatttgtagcttctttcctactttgcatttgtctctctttcgtgttggctatgttctaactagctttgacaaggaacaattcttgttttttctgaagttgtatctataggttaaccgttaacctataattctacacttaaaaaacaatgtagaggatctgaggctctaagctgttaaaataattttattaatttaacatatatgcgatataatagtttatatatatatatatatatatatatatatatatatatatatatatatatatatatcaatttcatataagcttggaccgtcggattacaactgcaggacggtgcagttacatctgaattccagaggacctaaatttaatcagcaacttataaccttagtgttgtataagttggatttattggaggtcaacttaattaaaagattaagtttctgggtcaagtctgggccttttttctaccttcacttctacccgtcattgcaattaagaagttattgggctcctccaactatgtttcatggtccaaggtagttgagaagtggtgaattggacaagggttgaagaaaaatactgaggagaaaattaggagaaaaatactgctttactgtgtactttatattgcagtctattgattcttaccttcacaacgtctacaccaattttcatacttgttatgagttgtggactcaatcttcgtaaacaacacatgagtgttcttgaaattattggacagtggttatctatcaaagctaaattcaatgctctcttaccaactggaaaaccaattgctgaagagaggtttgggttgaaaagtaaaggttgaaagctataagtgaaggtttataaacaaaaataataaatagaagcaatcaagaaaaattgtaaggaaaagcaataaataaatgcaggattaaataaacttgtttttaaattgattctccttttgaagttaagtataaggtctatttataggcttgaaactcagaagatcatctattggatcatatctttctacctcataactataatatctcgatcaaatcacaccataatgagaggaatatggaggttttgtacatgtgtgcgattgtataattaacaatgatttaaataaattaattgatattacatatatcaacaagatccatctatttttcactagcctataacttaataacttaacaattaagcatcttggtttgtagtagttatgagatggttgacctaaaatgtgtgagtgaggacaaagtatcctaaaaagttttatgttggtttgtgggacagtcattgattttgacatcaaccgaaacagattctcgaggtctaaaaaaaatagcatcagaaggttagaaagttctgactaacaagaatgttgagcaaagtgttactgtgtgaagtgtcatgatatgtgagttgttgtgaagtcgacaattaggagtattacagtaactacctaaaaaatgtgacttagagttgcaaatgtttttttcttaaccctccaattcatcaggagaaagggattttgactaatccaaaatttaactaagaggtaagtaaaatctaataaagatcggacttgaataatacctaaatgatttaatcttacaagacatgagtaatcgttgcaccaatttgatttagaaacagtcattaaattacacccaaatagcagcttcaataaatgtttaggaaccaaaccgcagctgtctaacatgttagggaaattatatatatatatatatatatatatatatatatatatatatatatatatatatatttgaagttctatcagaaagttatataaaaaattaaaaagtattacttaaaataaattcatttagacacacatttgtgccaacgactttgaatgagattttctcaatgtttagggcttccttgaatattgttagatataaaacgtcatcttaagctaagttttgggttatataacataatataatgttagatcatatatgactattctctctagagatgtaatttaaatttgttgctcccattcttctaagcaatattttagaacaaggtaagatgcttaagtgtagtctcatgtctgacaaagctatgttacgctttcatctaatagtttaaattcgtgggataattagttcatgatggtattagagacatgtgacacatatttttacctaaacaacttagggtgtgaatcaactcacatcggattcattgaccagtaatcctttgtgaaagtaagatttctacgaaaaaaccataaaacaaacacactaataagctttaggagtaattgattcaagaaatggtattaaattaaagacttgttctattcgaagtattgacagtggtggtccaaactctatctaggactaataggtgtagaccgataaatgatttttgccttgaagtgtgagggtagtagtctgaacttcttgaacctagtctgcatgagtggtggtgagagtatctgcaaaggccaaaggcacactccgatgccaagttagtgaagaactttacacaaagaccaatagtaataaatgcgcgtaattataacacagatgccaatagtatttaaaggagtaaggatggactggatctctatgctaaaggcccatgattcgaagagagaaattattcgttgttcttagaataacataaagtgactttaatctccgagagagtttgcagggtcaacattttagaggaacgggacttggattcgggttgggtcctagctaggcctgattcataacaaaactcatattaaagatgtactatacataaaatcatttttgtatttttacttaaaacgatttgataagctttgaaaatggttggctcttccacatgccatcgctgagtttctatacatgacctcgggtcaaagtttcggaattgcacctattatctaaatagaagttaaaatatgttggatttaaaccactcagaaaggggcggaattaagggactaggatgggtcatcactcccctaaaatttaaaaataaaaaatatatatttttaaaaaattaataaaaaatgaaaataaaatgaaaatgaaagaaaaaaaaaagaaaaatattaaaaaatgtgaaaggggnnnnnnnnnnnnnnnnnnnnnnnnnnnnnnnnnnnnnnnnnnnnnnnnnnnnnnnnnnnnnnnnnnatataaaaaaaagaaaagaaaatgtaataaaaataaaaagagaaaaagagataacaaaaaaagaaaaaaggaaaggaagatgataaaacaaaaaaaaaataataagggaaagaataaagaggaagagggataaaaaacactataaaagagagaggtctggacacataaacacacagaggagaaaaaaaatatacaaatcccaagagaacagaaatagtaaaaaaagttgtgtcatttggtactagaattagtgaaagagaaaggttccagttatcccttcattcctttcttttttcctcttttcttctttctcctcctatttcttattgttgttgttaatcttctaaaataaaataaactactatttattcaaggctagcaagaagaggaaagttcatcatttacctcttattgatagagtgattaaacttgtattcactcttctattttctataataattactgaaaaatctttctcaactataaagataatcaagactagacttcgaaatagaatcaaagaccaatttcttgatgattctttgattacatacattaaaaaaaattgttttgagttttaatacatattcaattatagataattttaacaatatgaaaacatgtagaataagagttaagtgaagtaatcttaatttttgtaatagatttttttaaatttttttgtatattaaatttgtattatttttgaaatacttttatttatgttataattttttttatgttcatcttctctcaataaaattcctgtctccgccactctcctcagacattttttatttatcaattgacgcttctgccacgtccctggatatggtacagggtatgaaaaagtgacacctgtacctgaccatgcagttgatctgaaggctttttatacttgtccaaaatcccacactgtatacatgaacgctatttttaagtcagatttaatttttcattttccaattaagcatatttctcaagatttctagatctctttaattcaaattttatgctatcgttgataatgcttttttaatgaaccttggatatgtttgagtcttactataatgttggtaactgatattttcattgggagtctttttgacagtgtttctttgctcgtggtcactcaatattagaaacattttttctgattgttgaatcatttatatgataatttatttttttaggttattcaacgtgttaattgtaacaagctgaaaactcagttgtaagcctcaatttgcagatgactgttaattagaacaaaagtatttgtattgagttggagttgtaccctaattatactataatgataactaacttagattaatagtaatgattggtatctacaagttgacaccttaaatgaagttgatgttagtgtcttgatagtcgtgaacttgtataaatgttcaaataaaattgtttattacaattgagagactaagaacttatgggaagtaaattctatgttggtagtattctagaggtgaaaactcaaagaaaataaaatacataagaggaaaattatttgggactaaataattttttgattttattttaacttttgcttggcttgataatatacctagtgagtccacatatttatagtaagcaatggaactttctagagaaaattaattcactagtgcatgaactattattacctagatacatgtgattttctaagtacatgaacataatttccaaaacaccctgtactaaactcccatttataatccaaattttctatttcactaccaaaatgagacaccctatttgtcaattcactcaaacacatacgattataagattgaagttttctttcatagctccatgatcactactttaagaaatttctagagctaccttccatgttagaaaagattggccaaataatctataaccgtcgacgttatagtaaaagcctacactcatgaatactctgaatcgttttgaataatgaaaggaaataacggggaagagtagcctagctataatgaaaataccaaacccttaaatcggcagaaggaaaaaaaatgaagcaaagctacaccttgggaagggaacaaccgacttcaacaaaacaagtagggcaaaaagtaaattaggatattaaaccaatcaccagggcggtttgacagtgaaaacacatggagagtaagactataaggagacattgagattgaatgacagttttttattttatattatcgatcaaaatatatgtattattttttaatagatttaagaattttatttaacttaagaataaatagtataggtagtaataataaagagtttcatattattatacaatgattattgtatatataaaaaaggagttatatgtttgagacaaaatctgtcattgatcaagtaaaacataaaagaaaaagaacattagcaatataaatatacatatataatacaaaatcgataatcagatgtaagtaattaactatattgatttgattatcaccatttatagacttatattcattaattatattttttattaaggtatctttaatgagagatttcaaattaggattttatatcattttttgatggatttcacatcgtcatttaggattgaagatctctcaaaatctttctcattttttcttttagtagtaaatctcattttgggatcttagataacttttaaatcttacatggacctcacttttaaatattttatttaaatatttattaaataaaataaataattaataaaacatggaagaaaaaaatttgtaaatattaagaaattgaaaatgagcataaatttaatttttatttatgactaaatgttaaacaaatgcaaaatacataaatttgataataaaaaacgcaacacattaatgctaacgaaaaattaaattttattattgttgtaattgtaatgttttcaaatatgctattccaagtctgtttaaagttgttgatgaattccttttgtatgcataagattaggcctgattaggtctgaccttgacctgatttaaaaacataaagtttggtttggcctagttacatgtgataggcttttttaggtttggtctgacctatttaaaagcctgattaagcttacaagcctattaaaaaaacctatttttaataaaaatttaattttacaaaatactttaaatcaatttaggaaagttaacgaaataattttaaacaaaaaacgtctcaacatcttacttatatttttaaataagtaataatcattttatgagatcttcaatgtgattttttgaagtgattgatcatccaccttcataataagaaaaaatatttttagaaaaataaatatattatttttaagttttaatatatatatatatatatatatatatatatatattaaataggccaacctgataggcttggcagactttttttaaagtttaaatctggtctttttatttcaacagacttttcaaaaaactttagcttgacctttatgataaacaagtcagaccaggccaggccttaaccaggtttgaccaaagacccctgataggcaatctgtcccattttcatccctatacatggtcataatcaacatcgacattatcaccgaatgtatctcgtttgtcttcaacaattatgttatgcaatatcatgcatatcaacattatatacttcaatgtatccatgttccaggcacacgatggaacacatataattgtgagtcgagatttgagcattccaaatgctcgttcacatcctttctcgctgcttcgcgacattttgcaaataattttcttttagggctttgtggcattggaatggtcttcagaaatgtggctcaatcagcataaaataccatctgcaagatggtacctcatattatatggagttccattaattgtaaattgtactagaagagttcgaccttgcaaaacataatcaaacacaggcgattgatttaatacattgatgtcattatttgaaattgcaactccaaatattaacgtcaaatccacaagtcttgtgaagcaataacttcaagttttattgtggatttgcgattatcacttctatgatattggctctgccatgcaactgaacaattttttcactctcaatgcatacaaccaatagaacctaacatgcctacaaacctcatgcatctccaatttgcaataggcaattgatgtcattgttgttaggccttctcaagaactcttgtccaaatatctcattgacaccacttacaaatttttgtaagcattgagttgcaatgcatttatcaattctaacgtactcatccacataattgacaggtgatccgtgtgccaatatacgaataactacagtgcacttttgcaatgatgagagacctattctacccacaacgtcaagtctcctttgaaaatactcatcgtgattactaatagtgttgtcaatttgaatgaacaattgtcgccgcatttgaaacctacgtcgaaattgagtctttgtgtatactgaattttctgagtagtcattcatcaatcgtagatgtccatcttcacgattgcgattaatcactcttctagtccttctgtattgactgttgttgccttcttgttgttgcatcacacgtaagtagctcatgaacaattaaatagcaaattatataaatgactagttttgcaacagctagttttataatgactattaaattatataaatgactagttttataatgactacaactagtttcataacatctagttttataacaattagttttcaaaaaaaaaaagacggttacaaattaataataaaaaaaagacaaatcaaacccgattcctaaaaatacaaattaaaaaacgatctcaacaaattaaaactacttaacaaattaatgctacatacctagtttacgcctaattattttacaaaaggcctaacgatcttggagttgactttcggttgtaaatgtgtcattcattaaaatgtcgtaatactctctttccaattctttcttccttaagattgctagtctgacattgagaacgtttatttcattcattgctttctccacaccaattaagtccacagaattggtaaatgtttctactcctatcccattgctcttcgttttggttgccttttgacccattggacggacaattggagacggtgtgtcagcttcagaatcttgtactgatgtttttgaattagatgacgatgaatatgtcccagatgcaaaaatcttcgtccttttagagccattttcaataaattggtctaaccatttcggttgttcttaatattgggaggcttacaaaacacgaaagaattgttttatggtattgaaagaaaaatttgagaactttgagaactttcagtgaaagggatttgattattttgcataaaattcattggtcgtggcaaatatggaaaaaatggaggaggattttgagaattttttatggaagaagattgattattttgcataacattcattgatgatgttggttacaagtagggaaaaaatgagggaagattttgagaatttccattcaaatgagaaagttgataattctacaaaaaaaatgcaataaacttgccaatatactgatttggatctattaagaatgaaaataaaccaagagattgagattgcaaataagatattgagaaataaaggataataaggagaggagaattggtgtgcaaaatataaacagtatttgttcaatttataggttgcaaaatatttaattaaaaaaaatacatagtctattgtgaatagattaaaaaaattaccaatattggttgcccactaactaaaaggcaacactaattttttttaaaggcaacatttaatgcaacatctattttttaagttcaaatttaaattgtaaattttttaatcttttttctcttcatcttcatcctcattttttcccaatccacgtgcagtcccttcctctttttttctctacgcctccccgctccccttcccctccttttccttttctctccgaccaatcccttcctctttcctcttctcctcctccccctttacgtttcctcttttcttcctttcccttcatgttttctccaccctcaaccaccaccacattcttttcccttcttcgcccccaatcactatgcccctcctcttccttcgctcttgaccaccacgactcccgccccttcctttgtccccaaccaccatgagccccctcttttcttttctcttctccacacatctcgacagtgtcacgcttcccttggtgccatcgtgtgcaactcagcaccgacaagggccatcgcccctacttcggtgccgccacagcctacatattatgtttcttcttccccttttcatttccttttatgtttgatttcttcttctttctgttgattcctacctaaatctattagggagagaaagtaaaaaagaatatattttattttcaaaatgtgtagattttcaaggatcttatacaagatttcattctccataatgaaaattttgactcctcctttaatagaagatttattaaacaatagatcttaaattcaaaatctttgttcaaaatatattattgaaaaatattctaaaatttttctctcaaaaggtgctcaaaatatattattaaaagatattctaaagtttttctgtcaaaaggtaaaaagtgagagacaaataaagcgattgaacatttgttagcatatcgctccagcttgattgagacgaatgtgaaaaacaatttggtccataactttttactattgtaacaaaataccttttcttggcattattctcatggaaacaatattcgtacatttgaaaatctcttttcaaatcaataaatctttcagcataaatgttctctctctgtatatatattccagcacaaataaataaattatctacactttgaagtcttttcttcaagtaaaaaatagatttaaaaaatgtgttctagcaaactctagtagcataaacgtggatattatatcaaatcaacttccagtagtgcagcagtgcagagagctgacaccacaaacttatcctcccaccttttaacaagtagttcctatccatatctaaggctccgaaaaccgtgacaatttgacacgactcagctagctaatggatactacttttgcagtttgcactagtttagttaatcattcatttccatttttagtttccaaccaacgaaaagcaattacatagcaaagcaaacaaatcaaattacaaaagaaaaggcataaaacgaaactaatttcatgtgcgacgtgacgtgatccaaagaagttggacacatatactaggctacggtgtacggaacggaaatcataaaaggtactgtgcggtttgcgcgtacctgtcaccgttacagagctcgtagagcttgcccgtgctggagacgatgaccagcgccaccttcgcatcgcagagaatcgataactcgcgagctttcttcatcaatccattgcgcctcttggagaatgttatctgccgcgtgcttttgttctcgattcgctttatctccaccttcttcttccccattcttcttcgcgccaaaaccctagctcgctaccttcttttctattcggatttctctctttactatctccctccttctattactatctctcctcatagccataggcttagcgtgctgattccttaatcgacacgtgtcccatgaccagactgcgatttaaattaactgatattcgtttcattttttaatcatctcatttcatttaacagtactagtcaaaaaagtcaaagccacatgctgcccacattgtgttgctaggtactataattttgtaaaacttaattaatgtaataatgtgtctttatatcaatttattttagaacttaacgttatactttgatcatcatccaattattcatataattaaaaattattttagatattgtatttaaaataattgtgttaattaatattataaaaatttatcttacacaatctattaaaattaaaaatctttattttagataaatatcattttaataatttaaattttcttaataataattttcaaaatatgcattcaatacttatttaatcaatttatttatgtcaaaaatacatttaatttaaataattaattttcaaatatccattttaattagtttattttatgtcaaaagcagatttaattaaagatttccaaaaaaaaaaagttttaaataatgattgatgtttccaaaaatgatcttcctcgttcatttatatttaataatgaaaacccatatggataacataactacataagtgaaggtccattttgaaaaaataagttggctgaaactagctaacgtgtcaaaagtcaaaactcgaaacaattactataattaattaattaataactattagatgcactgaggtcattggcacgtgattcagccattcaggccaacaaagtgggtgctgcaaacaattattactagtactggcagtattcttgttcgtattcctattattctaataaaaattattttaaacattcaaattcaatgccttcggtgcataaggatggatcacgatcttctacagttgcataaagaactgtacgggatatgagattcttatccatacaaaaatattcctttcataaaattataatataaaatatatatttaacgctataagcatccgttggatgcaactgcagaaccgtgcagttttttttttttctaaactgcagggatcctaaaccacataagtatagatataagttatgataagtagtcaatgtaaaaagagaagaatagaaagaaaaaagaaatgttaatagatcattaacatgtagtttgctgaataaaaattaaagcaggtaattcattcgtatattaatatttatatcatcctaactcctaagtggcaagtaacgtgcattctattttgagaaagtgataagaaagaaatcagataaaaatggaatggatgaaaaaataggtagatgtttataatttatctatcaatactcttattaaaagggaagaaacagtaaccgaagcaaagaagtgcagttttatgaaagagttagcacacacaaacaacattgcttaactttgttcctacttcaaacatggtagacacttacatcttccttacattcaaagccattttcttccttctttttttttttcgttttcaaataaaattggaacggcaaatgtgctggtgcagtggatcttatgcaggaaacgctaactatggtaaccatcctgccatgtaattgctcatgcttgggcctgctgtcaccactgatactggatcaggctgatacctgcacttgaaaaatagtatcattattaaaaaataattgaaatctaaaaaacttaggccaagaatgaaaattctaaataccattatagttatgctaatcaaatcaaccaactcatatgaccccacatctattctaatcatatttacatcaaagatgcactcctaagcatatcccttactagtgaaccaaatttgtcattgatgcacttatctaccttactagtgaattgaccatttgatacagtttagaagagtaattaacaattgtgaactgtaaagtgatcaatgattgagtcaattagcattgagtgcatacccaatttgtaacgttggctcacactccatttgttgaaagagggcttcaccatgagtatgagctggatgcctgccatatcccatctcttcaactccgggattcagttggagttgatttatttgatacccttccaactgctacaaatcagataaagtcatttatacccatcaattttcgatatcacaatatcagttgtatcttatagcaatgttttggtcttgcatgattcttaattctattttaaaatgtattaatcatatgttatatactttgtgggatgatgcatatttacatatacaggttgatgaattctaagtttctaacttaccctttgtctgagagacctgttagcttcactcagcaagtgttcctacacaagtgacatgtataaattggtgagcaaccggaggtatggcatgagatggtaaacggtggcaaaggaaagtaaaattgttttcatacataccttacgttgaagatcagagagctgatccagcatgaactgggtctgtaaatcaaggaaacaaacttaacaaaattacatacacatactacatttttacttagaaattacacattttgagattgatatatctatatttagaattatgtaacgagtttctcctcttcactaatcaatagagaaattaaagaacagtaatttccttgttagttactttaccctttgaattttaatggtaataatgtgcccccaatacttgtatttccatttcttacattactcagagcatgacttaaataacgctctcaaaatgggcttgaccatatagacatagggatatttcaagattgggctcttaatatgttcctagatctacaatttcatatgttaattggcaaagaaaagttggaaacttgagtacccttgttgatcttatttgcttcaaggacgaatctagctgcctttcaagagactcgagctctttgctgcttaaaggaccaagatcttctcccataaggttcctgagagggtaaaagttaaatacaacacaacattgacttggatgctatatagtatcaaccaataatcatgagccatattattagaaggcccaatagggcatccgtacctctgggaccgttgtagggcctcataacgtgccttcagcttcaagtactcttgttgactgcttaactcctatagtcgtggtagcaaaatcaaactatatagttaaaggaaaaaactatataattaaaggaacatatatagcgattccttttatgtttttccttagtgacctggtcaagacaacagcatttctattcgagcaatattctacttgcaaacctctcagctatcacaaagggttggataaaatatgttttatagtctttgaaacatagttaaatttagtttttttttttaatttttctaataatactaattttattcgttataaattttatttttataaaaaaattattattacttattgatattgtgacatatatccaacacgttacaatatgtgtcatctcaaaatcatctttaacttaacgtgaatagtcatatattactcaatgctgacattcagagacttctaaaaaaataaatttatgagaattaaaagtaataaaaaattaaaagaataattgaaattaaatttagtcatatttatagttactaaaaatatttgtgtaagccatagccaataataacaaaagcttttataaaacatatatgctggcattcattttctgagctttatcatctttttnnnnnnnnnnnnnnnnnnnnnnnnnnnnnnnnnnnnnnnnnnnnnnnnnnnnnnnnnnnnnnnnnnncttttttctaggttgaggcataccaaaaacattcaacgtgttaaagtttgataagtcgttgagttgagtagaaaatagaaagaaaacatgcatggaatacacaaaaattaaggaacgatttattcacacgagttgaggaaaaaattaaccataagaataaaagatttaatggattcaattaaacaactgacgtcgcaaatgattgttattgttaaatagggttttgttacaataatactataagcatatttgtaacaaataaaattatgctgatacataaataaataaacatgataatgacgggatgacgtgaatatgtaaacatgcaaacacaagtttaaaacacaatccatgaacatacacactaaattacgttaattagcaatcaataataaaataaggcacgtaaattagatactattaataacataaggcaaattaaatccaccctcaaattaaattttatttttctacttttcttcgattgcgagtagctacatttcagcacatatgttatcgatggccaaattcatgcatagcttcaatccctgccaattttttgttgttacaaaaagggcaaatactgagtatatagtgagctagagtataagcaaagcgttcagaccagagcatgcggttatatatcatagttgcatttcttattgcaacaaatagcattttcaattcctaatttggctctattattgcttaaattaatttacttatcaaagggaaagtcaaacttgattattctaattattttagatttatatatttatgaaattttctaattacaaaatagcgatggctcatgaaacattttttgcacgaaagaaccaaaactataagagcaatgcttattctacaaaacttaatgggttgtgtcaaaaaatggaccttgatatacaattttttgtaaacaactagacaaattcggctcagcacatttagatcggagaactgagagaaggaagtactattggtacatgatactaatggcacacgatcgtacacaaataaaattataggctcacacaataaaagttactataagaacaaaaaattacatccgtcatctactatatggagatattcatgacaatatatatatatatatatatattaagattttattatttacactattatctaagttttaaaattttcaaataatgcttaaataaaagaattcaaataataataaagggtctgctacaaagtgttttactagtatttcgttaggctataattggaggctcgccttaaaagtccttatgaaggacatgggcaccttatgcataaatttaggaaccagatcaaatttatgtaatcaaattaattcttagtatttcgtgtacgttatgaaacctgatttcctgtataaaactaggtaagtgtatggtgctccatatgccaatttgatgatccgaaaatacttccaatttctgtgttccccatacccacctcaaacactggatactttctagccattgcactaaacgggcctagaagacatacagtcaaaagttcttgtgtgtgggaaactatttggagcagttatactgatcatgaataatcttaaacttatttgaaacagcctaacaaagaaaacaagtggaaggcaaatgacttaattttattttggatgaagttgtccttaaagttcatgtatctttgtaacaacatcaccaaaactatggtccactgtaggatcaattttaaatgagcatgaagtcttagatgcagatacagctacaacaaagtttagggtgcctaaaaaatgaattccatgatacaaaagactaaagggacttcgaaattaaaccaatatgtgctgtctctatgatacttttgtccacatgcaattaaaaagtaacgcatattaattaatgcacacttgaattaagtcaaacgaaacacttgacttttgttgttttgacaaaacctcttatatcaaacaacaatatatacgcaagttaatatttttataattattaagagtgtattaactgaaaataagaatagaagtcaaaacaaacacattgtattttgaactttttttttcaaaaatagtacaatgagctaaattgattatactgtatattatgatagtagatttgcatgaacaatattaagctttatttttaaaaaaaaataaaagactttttttcaaatccctggattcagaatttgtagttgcgttaggttattagttaaacgttttacaccacaacaaattcaattatatcagtcaatgaacaaaaatcagcataacttttgtttgctaaagaaaaaaaaatacgttacgatttcagtatttttatttatatccatgaaattctttttcaagctggaactataaggtgattttactgcacttgccagttgtttatgtaatcaacaaggtaaacctctgatcaaccacgagacacagcatatattgacaatgctaaacgtaatataaaacagctataccccacgttaaggataattatagtaaatagttgcagcccaggaaccccaatccccttgtaagtaaaacaaaaacagaaatggatgaggtaataaaatcagccatcaatttaggcaaattaaatgggcaaaaaatgcatttaaatacgatagatgggactattcaccattaccaaggcttcccgtgtagacacattagcctcaggcgcaccatagttacatttctggtatctctctagcgttttgagcatgctgcacgttttgagaaaaaaaatatatgtttgtataagttagatgtcaggtacttagtacttacaaaatgatccaagataaattgagtaaaactagattctacaaatataaattattgctcaaggacaaattatccatttattaagacatctttttacttcaattttgctttaagtccaacatcaacaagaaaaagggcacacattttttccaagcaaagaacaggaacaacttaagtttgaaacgaagaaacccccatttggaggcaaggatgggaatgctccataaatataggaaaaactataagagatgcagaaaatcggtaaacgagctggattggaagatcttatgagttatgacaattaagtaatgttttagttttagggctactatcgaaaaacatcatatgacatcaacctctgaatttcttgaccaggaccagagaaggtcaccgatgacagaatttaagggaccaatcctctatttagatgagaagaatgaaaacaagatgtgaggaaaaaaaaatttataagaaaattttgaagttttttttctaaagttttcatttttgaatcaaaaagaaaagaaaaaatctcttttttttcttctctccattcaacataaaattgtttacacaacaattttttatagtaatactatatttttttctctactaaatcaagtattttatctcacaattttcgttatcttctcttcttatatctctatttagtctgtatattatagcagaaattgtacaaactaattatataaatacaatttcccaattactaatgttaataaattgtacaaaatgggtagtattggatttgacgatgagacatgagactggtttcgttgataaacgtgataatattaggccatcaaaaggagccaactacaaatcaattatcagttatagaaaagaaaactggtgtcctattgaatgtaggtgaggtaagatcatttgcatggagtgccaccttataaacccagaagaaaaaggacggaacataccaagttactaacagaattttcggtacaataatcagatctgaaatgaccagagtgttgcttccacaaagaaaatatacgaattgaaccttcggaagacgcaaaataatttaattatttgaaatgccaaaccaattaaaagaaatcgtctgtctatgcagataggaataatgaggtgattggaaaacatgaatttgatgctgatttaacaaaatgtccactctgatttaacaaaatgtctctatcatgaaaaacgttcaaatgaaaaagaaaaaaaaaaaatcttgtgtcagtagtaacgtggagaaattaatcaatcaagcgattgactccaaagtgagaacctttggtcatgattgtggatcgaaaacaaacaaaccccagagtgtctgtaagtaattgaagcgcttgaccaaaatagaaaatcacgcaagctaaggcaaaacataaaataaattttaaatgggagaaaaatagaacactgcagagatcgatatatggtgagaggtgcaggaggggaaaaaaaactatctagaaataaaaaaaagaaaccctaggcccccccagagatgtggatgagacatacataaaatattttctttaaaaacggggcgtattaatttgacagtgaataagagatgagttacgttgttggagcgatgtttgaagactgaaaccgaaagcaggctaggtgctaaacttccaaatggaacaaaataattgatatatatgcttcttttacacaacacctaattacaccgaaaagaggcctgacccgagactccaaaattacttttgggaaacgcttttgaacctgatctgtttgacggagcagaaaaacggcaatctcaaatgctgggtttagcaccaaaaatgggaaagaaagagaaagctcaagactcacccaaaaagaagaagagaaacgagggcagagaaaaaaagaacataaatagagtggatacaataaaacagtgatcctctcttgcttaatttattttatgtatgtctgttccggtttaacgcgtttccagttgcagatctaacagcaacgcgtttgcagaaaccctcaaacctcctaaaaacgccgagacatttcacggaaacggaaaaacctcaacagtggaaaatgaaaaataaataaataaataaatctacttttctttctttctcgtgttttctcaaacaaaactaaaataagcggggggaaacgccagctgtctggaaacaaacagcaaaaaaaaaaaaaaaaggagagagatttgaagatctttaaaagcaaaaaaaannnnnnnnnnaaaaaaaaaaaaaacttatttcttaacaattactcaatctcaataatactgttaaatgtgcatatcaattgaaattagattgttttagtttagacagtgatattgagtttttttttatgcaagtgatattgagtctgtacataaggcttctaaaaataatactaaatgattaacaaaattgtattttactggtaaaatggaagtattattattaaatataatttcagggtattaaattaacaaaattgttgaattgagtgactccgtgttatgtcataaagcactaataatacatccattaatttttaatgaataaatttacgcctctagtttaatattaatgatgtactaatagtgttaggattgctatcaaggagagtctaaatatatcatctaaggaaataaaagtacaaagtttttcttgtaaaagatagcatttattatgtcaaaaattaatataaactagtctaattaatgcataatttgctaagtgatttaaaatctctaatatggtgtatttgttatttattacccactatccttaattagcaggacactacttaacaagaccgtannnnnnnnnnaaaaaaaaaaaaaaaaaggagagagatttgaagatctttaaaagcaaaaaaaataacaagaaagaggtttttttttttgtgtgtgtgtaatttgtttacattttagtgaatatacatataccttgaactgctgcagaactcgtacagttttcctctattggagaagatgatgagagcaacctcggcatcacaaagaacggaaagctcgtaagctttcttcaaaagcccgttccttcgttttgcaaaggtcacttgcctgttgatcttgttctcaattctcttcaactccactcttccccttcccatttctctcgcttctctttcttacacactctaatatccaataaaagggaaaaacaaaaattggaataataaaccaaaaccctgtgatgaatattttcgtggctcgctcgctccgtgtatgcttgtacacgcatatatatttatatagccacgatgtcaagatcttacaataaaaataataataaaaggggaatattatatatattatgatttgtgaaattattattattattatttgtatgaatgtgagagcaaaaccatctttatcaagccctaatgcaaactccaaaatcaaaaccccttgtacctgtccttttctccctgctatcaccctctggtgtgtttaacacactgctaactccatgacaatgacacgcctaaggaaatcaaaagtttcgttttgtaagtggggaaggcattttctgcgacctagctacacgtaaagtggaccttaggatatacttataataaatttttataatttatatcttttttctatcacatcactagctatatctattttttcttctttttattctaatctttctcttaattaaaatgtacattttaatgtgtgagtaacactgtatatcaaattttaaaagcaaactaaaattatctttatcagcaaaataaaatttattaaacttgggtaaaggggtgccacaacttatgcacatagtatcatgtcattgccttcagtcctagtagattttattatattctctaaacatattttcattgtgggatggattcaatcatggatcaaccgttagtttatgttttcgtacttttcgtgtgagacattcttcgtatcataaaacaatttcctttattatcttcttaaactctgtcctttttaaaaacaaaaaaaaaatgtgttaaataactatttgtaagagatgaatagtatccctaaaaacataaagagatgagtagtaattgtaattacatataattataagaaaatgattgtactaataattaccttgagaacaatgattaagaaatcaacaaataaaaaaatagataagatgcagtagaaacattaatnnnnnnnnnnaaaaaaaaaaaaaacttatttcttaacaattactcaatctcaataatactgttaaatgtgcatatcaattgaaattagattgttttagtttagacagtgatattgagtttttttttatgcaagtgatattgagtctgtacataaggcttctaaaaataatactaaatgattaacaaaattgtattttactggtaaaatggaagtattattattaaatataatttcagggtattaaattaacaaaattgttgaattgagtgactccgtgttatgtcataaagcactaataatacatccattaatttttaatgaataaatttacgcctctagtttaatattaatgatgtactaatagtgttaggattgctatcaaggagagtctaaatatatcatctaaggaaataaaagtacaaagtttttcttgtaaaagatagcatttattatgtcaaaaattaatataaactagtctaattaatgcataatttgctaagtgatttaaaatctctaatatggtgtatttgttatttattacccactatccttaattagcaggacactacttaacaagaccgtaatagttcaaaattacatcgtagaaagtttaaagaataatggaagaaatcataaattatgttagaattgatgaaaatatgattaattagaacgaagcgaaataaagtttcaagttaattcatcatttggatttttttttaaaaaaatgaaatagaatgatgaatgatgaaatgaatttcatctcatttcatccaaccctcataaaagtatagtatatattactttttacttgtattcaatcgcaattctattcttttaaaattaaaaactcagacacaattatcatttctacgttgcattttttacaaacacgtctacctacttaattactcttgcagctagcttgttacttttaacttataagagtatcaacggaacatgattgcttaaatggattgtaacttgtaagtatccgcgttgaagatattacaaggtaactaattatacttcattaacttgccaaacaatagaatgaaaaaattatttcattatattataaaatagctataaaagtattgttttatttaatttattttactctgttatgtattatttttccccgctctattgatagttagatatatcttggcgaaacctcaaagagaagaggtgagccccataatgaagatggagagcgaatcatagctagttctacgtgtcaaaagaaaaagatgaagacaagctgatctatacttgaacaatatcgggtccgtaacttcgtacaatcatgtgaccataccatagtactgcttaagaagtgtatctggacatctcgtactcatagctcgtatgttctttccccaatagatttacgatcactatgatatatatgaatattcatatttttatatacctaacaaattattatttttctcaccattacgaaataattttggttagaagtggtaattaatttttgtagaaaacagtaaacacatataaataaatattttctttttaacattatttattttaaatttaaatatcaatcaagatttgaattctgaataacttaattaaaaaaaaagtcattattatgtcaactttattattagaagggacacaagttataataaattaaactcctatcaaaaaaacatgtatatctatctataaatcatattacctataaaatctatacttttttactttaatttttttctcactaagtgttcattacatactagatgtccatctataacttttcatttacataccccttcaatactaagtagatcctttgttgagtaatgcaactcctctaaaagaatctttttatgattttttataaataatgtcttaattttttacattatcaaataatattaaaaatcacataattttttttactaatgttactgattctgcaattgggtctagtgctaaggcccattaagggatcgtggtcgtaattttcggggacgttccacaactaaccaagaggtatatacaatataaataagagatggttacatagaaaaagttacacacattctcgttctctctctttttcattcacactgtgcacacatctcatcccactgagtattgtttcgtgcatagtgatcatcttctggaagtattttcttctatataaatacctcccactgagtattgtttcatgcatagtgatcatcttctgaaagcattttcttctatataaataccttaagaaataatttgatctaacatcgaattactagccgtccttgttggacactactgttgataaaacaacataacattggggatgcatttaggttgaccccttcccactcaacttattgatttgttttgcggaccaactaacatttataataataatcactttaaaaattatactaataataatttttaattagctaatattaaaatataaagaaacttttacgctgatgctacatctctattaaactttttttattcattcgtttaaaaaaaatgcgttttttaatttgtttagaagtcgctagtgcactttgcttttatgcctttcattttatctattcgagatcaatattcaattctaaacttgttctcattttcgttagattggagaatggatatatattttcgtcccaggagagataagagaaacacgcccccgctctcttttcttgcaaaattattcgtgggtaaagaaacttgcccctacccagtccactttttttcaaataaatattataataaccatattttaattcgaactatataaaagtatataataatattttctagaaattaaaaggtaggtttaaaagaatcaaatcatactactaatttaaatttgtaaggtgttattcaaatattattatagttagtgttatcaggtcaagtttaagttgagtcaggaattaattgaaaattatctgtattctcaaatttactttcgcacctccatttaaatttcggaagaaaaaaaatctatgataaattatacatgccctctaaaattcaataaattacacttagtattattttctttttcacattactttgagttttctttatctatataactgcttaaaatattaaggggtgtttgtgttaatgggaagggtatacatatgttgttatgttattatgtaaattgaggaaagtttgtgtgtggggcaaaaaacaaaaggatataccgagagaaattttaaacttcaagaggtgtgcttggatgaacctaaaatggataaattgttttttttaataaaaaacacattcgttatcacaaaaaggataatagtaatctcaccattaactactttaatttactttaatttaatagtaataaaaatattctgatgtatatggatcattggaattgctgatgtctgtggatcatttctgatgaactaaggtgcgcatgtctacaagggacgaactaagcacttgcaaaatgcttcatttctgatgtatgtggatcattggaattgctgttttcagggtctggttattatctgatttggtggtgtggaaatactctgctgatttttttattataagtttacatatatagtagattcttggtgggagggaaagaatacatcatgttttttttggagggagacagtagttatatgttttatattcttctatttttggtttcagagtatagttataattaagataagaggtgtataagctcctttcttagtgtgtaactatgactctgtcatgcatgttctttacttggtagttgttggtacttctggttccagttgatatatattatttgtctttgttggctgatataaataaataaaacttcaagggtgtgaggaaaaattgtccaaaaatctaatctcgaataggttaaacttagtttttttttaattaacgttgaggcgaaatagagtatagatgagctactcaaatttataatttttttatcatgtcaaagataaataattacaaagtaaagataaatttacagcatacctttttttttctcttttctataataaaatgtggtagcataatgtttttggaaaaaacacataaaattaaagagaagataaaatggtttaggaaatgacatattataaatgattcattaaaaccaactatgcttaaactatgaattttctttttcaagttatactcaagttataagattaactttcttaaacatgaaacaacatatttagattctattcacaaataacgtctcaataactcatacctttttttcacatgcaagcttattgtcatttgtcaaccttttcatacaagtttccgggttcttttaccattgtttctttctaattaagtttgaatggagatcggagatcgaaatacaagtctgacacgtctctcatgtagtgattggcattatctcgatgctttaccaacatcttggggttattcagaaaagaaaagaaaaagttgaactacttctattgtttagttaaatgcattttttgttccttgaatttttaacgttacaagtttgtnnnnnnnnnnnnnnnnnnnnnnnnnnnnnnnnnnnnnnnnnnnnnnncactaattttttttttaatatcatattaaaatttgtgtagggtattggaatattagaataattcttttctgttgtaactaccaactgtatttcgcattttctgttgtatctaccaactgtattttgcattttcagtttttagtaagcttctgttttcgtgattatgcagtagcttgctgactgatataaaaagattgtattcctctttttcgggtaataaagatgaataataaaatttcttcttccattatcagtttgtaagatggtatcagaagatattctcctctaaaatcctttgcttccgcgtttttctccttccttttccattcaacaatggcggcccaaacagcttttccagaaccaataacaaatcctgctaatcctctctaccttcatccaaacgaaaatccttctctaatccttatttctcctcccatgaatggcaagaactatcatacttgggttcgagctatgaaacaagcgttaatatcgaagaacaaatttgctctggtgaatgggagttttcctattccagattcttcagctccaaatttctatgattggcaaagatgcaatacaactgttctctcatggatccgctgctcgctcacagaatccattgcaagatcaatcctctctgttgaacgagcagatagagcatggcaagacttgaaagacagattctcagagtcagacatttttcgaatttcagatttgcttgaggaaatttatcatctacaacaaggtgatctttctgttggcgattattttacaaaattaaaaataatttgggatgaatatgacaatctagatccgataccttcctgtcactatgcatcttcttccttgttacgaaattccagagatagaaaccatgctgtgagatttttgaagggattaaatgacacttatgctgcagttagatcccaaatcatgcttcttgatccttttcccaatataaacaaagttttctcattagttattcagcaagaaagacaatttaatgttgatccaatgcttttatctacaactgaacctcgagcttatactcatagcactgatcatcgaaatagacaatttcaaggccgaggcaggggtcgaggtcgcaataccaagctgtgcacatattgtggtaggacaaaccacaccattgatacatgctttgtcaagaatggttttcctccaggatataaatcccaagttgatcaaaagaatgttaataatgttgattctcctgcaaataattcattgtctgactctgtatttctttcaaaagaagaatattctagcatcattgatttgcttaatcgatccaaggtgactgaaactggatcaacttcatctcacgcttctaatctggtacaagttaatgcctctgcttctactattgattctggaattcctggtaagtcaattgaatggattttggacactggagcaactgatcatatcacaaactctatacatcatttctcatccttttcaatcataaaacctgtttcaataaaattaccaaatgaatcacatgtgtttgcatatcattcaggcactataaatctttcaaaagatcttattttacataatgtcctttatgtaaaagaattccatgtcaatctcctttctgttccaaaattattaccttcttgccaacttatattttctggtttttcatgcaaaattatacaaatcaattctcaacggatgattggttcagctaaacttcaaaatggacttttcattcttcacgaatcattgatgcctcaagtcaatgcttgtcaagcctgtcccactactgattcaactttatggcatcttcgattaggacatatttcacaaaccactatgaaacaaatgtgtataaagtttcctttcttgtcttctcatcatataattccttgtgatacttgccattatgcaaaacaacacaaactgccatacacaaccagtaccacttccagttcatgtatttttgagcttttacatactgatatttggggtcctttcatgacttcctccattaatggtcacagatactttcttactgtagttgatgatttctctcgatttacctgggtcatattaatgaaaaccaaagctgaaacacgttcacatttacagaattttattcaatatgctgaaacacaattcaaaactcatgttcggatcattcgcagtgacaatggtccagagttttccatgacttctttctttaaatccaaaggtataattcatcaaacaacttgtgttgaatctccacaacaaaatggtgttgttgaacgaaaacatcaacacattctaaatgtcagcagagctttattttttcaggcaaacacaccacactctctctggtctttttcaattactcacgcagttcacttaataaatcgtctcacaactcctcttctttccaatcgcactccttatgaggttttacatggaactcttccttcacttgaccatttgaaagtttttgggtgtctctgttatgcaaacacattggtttctaannnnnnnnnntataaagatggcacaaaaggatatctccttctagatctcatttctcatagtattttcacatcccgaaatgttgttttctatgaaaaccaatttccgtttgccattagaccttcttcctcatcagatatttcaaataatattcaaaataatctttcatctcttgatcttgatttttctaataccaacccacaacctttatccaatacaccaaatttagatttcactactgaaaatcttgaaccaacagcaaacatatcagattctcctactcatattccagaaatacctgttaggagatcagctcgtactcgagttcctccaactcgattacatgattatgtttgcaattcttcaatcaaaataccttacccacttaactctgtgatgtcctttgctcattgctcaaaatcttacacacgtttttgtaattcaattacttcaaatgaggaaccaaaatcatacactgaagtagccaagcattcttgttggcaggaagcaatgcgtgttgagattgcagcccttgaacagaacaatacctggactatagttgatttacctccaaataaacaacccataggatgtaagtgggtttataaaattaaatatcgagctgatggtaccatagaacgctataaagcacgattagttgctaaaggttatacacaatttgagggagttgatttctttgatacattttctcctgttgccaaaatttctacaacccgtgtactgctttcagtagctgtttcacagggctggattcttgagcagcttgatatcaataatgcttttctacatggagaattagatgaagaaatatatatgatgcttcctccaggatctcgttctcgaaattccaaacaagtatgcaagcttcaaaaatctctatatggtctacgacaagcaagcagacaatggtactcaaaactatcacaagctcttctgtttttaggatataaacaatctaatgcagatcattctctatttgtaaagattactgcaacatcttccactgttttgttagtctatgttgatgacattttactagctggaaatgattctgttgaaatacagcatgttaaatcatgccttgattcccaattttgtattaaagatcttggtacattgcgatattttctgggtcttgaaatttctcgatccacaaaagggcttgttattaatcaacgaaaatatgctttggaacttatccatgatgttggtctcttaggtgctaaaccagcttccactcctatggaaccatcaacaaaactaaagtctgatacaggggttctttataatgatccttccaaatatagaagactaattggtcggctgctgtacttaaccataacacgaccagatatttgctttgtagttcaacaattgagtcaatttatgtccaaacctatggattctcacatgatagctgctactccggttcttagatatttaaagaaatctcctggacttggtctattttttagctctgccaactctatcattccatcaggtttttcagattcagactgggcttgttgtttggagaccagaagatctattacaggatattgtgtttttataggatcatcacttgttgcttggaaatcaaagaaacaaactactgtttctcgatcttcttcagaagctgaatatcgggcacttgctagccttacttgtgaattacaatggttgtcttttctttttaaagatctgggaatacctttatcacaacctatttctgtatactgtgataatcagtcagcgattcatcttgtccataatcccagctttcatgaaagaacaaaacatatagagatagattgtcatgtaattagagaaaggattcagactggtttgatccatttatttccagtctcatcctctacacagcttgcagatgttttaacaaaagccttgcaaccacatcaatttcaagatttcatttccaagttgagccttcttgatattcatgctccaacttgaggggggatattggaatattagaataattcttttctattgtaactaccaactgtatttcgcattttctgttgtatctaccaactgtatttcgcattttcagtttttagtaagcttctgttttcgtgattatgcagtaacttactgactgatataaaaagattgtattcctctttttcgggtaataaagatgaataataaaatttcttcttccattatcagtttgtaagatagggtcaattttaaaataagaaagagtgaatatttattttagtttaagatattcctccaaaatattttgatactttaaattcatgaatctttttctttacttctaacccattcacaagggatcacttgatttccatccgtattgttttaggataaaaatataataacatatatatctttaaagggaaaatttaatatatatatatatatatatatatatatataatattataaatatannnnnnnnnnnnnnnnnnnnnnnnnnnnnnnnnnnnnnnnnnnnnnnnnnnnnnnnnnnnnnnnnnnnnnnnnnnnnnnnnnnnnnnnnnnnnnnnnnnnnnnnnnnnnnnnnnnnnnnnnntataataatatataaagtaaattatgattatttaacaaaaagtagataaacatttagaaaaacgtaagtaacaaaattatatttttatgacttttattatctttaaattttaaatgaacggtaaaatatatgtacaattttattcttttcatatttatcattaaatctttaaatatgagtaattaattatcacagttttaagaaataaaatagaaaatctctgctagataatacttagtttgcgggacctattagaacttaacaagcaaatttaatttcaacacgactgcaaaattctatttttgttttggtacttaattatcatacacctcctctttaagtgaatctatatatactaaactctgatttcgatcccttcttctgcgatgcatttataatttatcttatccagtgttgtgttgcgtgtttatatatatatatatatgctggcttccgttgatgtgtgctgtagagaaactagtacgggataaaaatgacataaaagtttagtagtttacatattctaccatagtagtttataagggtttatctaaaaaattcattatgattaacttcaatttctaaattttgaaataaatgcctggtatccgtagccacattaagttttattttacggaactaacaattaaaagcttttaaattaattccaccatatattcctgcgaagggacatttaccgaataccgacctagctcttggaactaatttagaagagttctgaaaagggttggagatcatgttctgtttcatatgaggagggaaaaacgtacccctatcaactagacatgttattacctttcctgccaaatcatgcgcttcttggattgcagttcttgataccttattttatggaaaattttggaaaccaacatgatggctgcaattcatgatatgccaaatcggtgctttgtcagaagcttacaatgaaagtaatgtgtggtctttgtgtaccaaaatcaattaaaataagaactattttagcttgaagaaataattaactttagccaaatatgttttctggcactagtagttaaacatgtgtataacgggttaatatcaaacgggaaaccgatatagaatcattttatatttaagtatatagccgaacttcagtcctcatatttgactctattcttattcatgatttagttcaattaaaaggatattcatattgctcattttgataagttttatttttagttccacgtgtattttttctgacaattttattcgaaactatctgatacactggatgtggatattctctctcaacaaagattctaaccttgcttcaatgaataagttaattgaaaagaaacatattttagcaactagctagagtatttattaaaaaataaaatgttaagtgttgtgattattttttttagtataatttatttttgacaaattttaaattggagatatttcaagtttctattaatactataaaataatttcgttggtataaaacattatatactatcaaatacaccaaatgctagtatgataaattatattatagggcttcaattacaaattgtttaatttttcaatagacaaaaggttatacaacaataaatctcattccattagataaggttatactaataaaagtagttctaatgcttgatagttatttatttattaataaataaatgaattttttgtgtgtgtagatatcataaattatgcctttgttataagtggaagaatgtgccaagaaataaatattgttcaatctcataggtttaaaaactatttttgtctaaaataattgttattttttatttatttattattaaaatacatgtttttttattttttccattttaatttttatgagtaatgatataattagcgagtagcaaagtatcattactttatatgtcacctcttattcttgacttataatctaccacatcattaaattcattctattagaggtatatattattcgttttgcctgacataagtctcatgattttttccttaaaatgcataatggattaagaggcaacatagcggaatggtaaccctccactggaggctaaagggagtgtgtgtctatagtttatgtgtgtgacctaaaccctctttttaatgttaaggctctaacttgaaatcgactacatatatcgttaaacttatcacatttaaggcattgtctattatgactcacatgtttcttacaatttagtttttaaaatacatctcaatagatcaaagaagaatgtttataaactaagaccttgactcctaatcgtcatgagactttttatatatattgaaatagttccaacctttgcatcatttgctcaacatattcaaggtattgtccacatttcaacgaatttaaggataagtgtgtctatagattatcattagttttaactcctaaacaacttgaaactttttttatatataccaaaacactggtttataaaataaaattaatgataacaactaaaaacatatattttaataagacacaaaaccacatttgctatattaattgcaccatcaataattttatatacaatgatgttattttataaatcaatctaatcattgaattttaattatatattactaaactatttctatcaaattttatcaaagttgaacaactataaatatgtaattacatttttttatttttatattctaaaagtaaatattacataattttttatgtatattagtacaatattaaacaagtttgaattaaaataaaatttataaatatgatacgaaatttcaattgatagtagattttgagataaaattattcaataatacaacatacaatttgtgtatgtgatattggcatgattaatattacacaaatattcatagattttcaaaagttaaggcaccttatcactctcctttgcagcacatgggtaagattcgattttacagatctcctaactcctaaatatgtgatagtggtagggaagtttcgtatgtgtatttaagtctaccctggacgctaaatctgacgagttgattatggatgcttaatgttagctttcattggattcaaagtaaaataatgaaatgttaaatatacacatcatctccatccataataattatttgattccaatccagtcctcttctgtgttctaaaactatccattaccgtatctccaatagtaccacatatatatgggtattggagtgctatgtcttaattcaacttcatcccccaaataaaagcatatgtccaacgaccaacactccacatttctttgaattttactacccaagaaaaatagaacgtgggttgggccattcttgcatttcatgcacttgatcgtacatcccagagagagagagattttttttttaaaacgataaggttaagaattagctggaacactgaacaaggtcccatgtggtatacatatatgatatatatatggacatgcatatatatatatactgatgaaccacttaccaatgttgttgttgtgttgaggaggggaggaacagtggaaatgaagtgaaccatgaacaatctgaattggggcatcgaatcgaagatggaaacatcatgggacccagcacactggtgcaccaacaataattaactatgattttattatgtgcatggagcaagatatatgtcaagactacttgggctcgttcgttcggggaaaactgtggtgtggtccaacgtaacaggaactactggctggtggaccatggaattgaccaatcaactggatattagcctcatacaaatatggctctggctctgctttgatgattgagactcccacgtttttttctctttcctctccttctttcttgaaagtgagagcgaaagattttctgtaacgagtgagaaactgtctttagtactatagattcttttgtgtattttactattaaattaaagagtctaattaattagtgttattagtcaaataattaagaaatttaaaagaaaaaatatttattatataaattataagaaaatacggaaagattatgaataacataattttttacttttcaataaaaaaattatactttgaatcctttaatcaatgttcttagatcattagttagtatttgtctaattaaataacctcaagaataaaatatgtttcagctagttaaagtataatgaaattgtgaaagatataatatgaacaataattaatagaatttaattaaaatattcttaaagtataaaagtttttaaacagccatatattcaattatatatttattctttacaataagaatttaattttattacactactatagtatataaaagaaaaaagttgctctatcttaaattgaactgagactcccttaaatccctaacattagagtgagtgtgcttgaacatgcggaaaaaaaggagtggtgggaagacgaagagatctatctatgacactagtaacctaagtgccaattaccacccaactagagtctcacatttcttccaactctaaggttcgatcaaaccaatcttaaaagatcgttgaacttagggcgtgatagagtccatgaagcagggaacaactcgtggccgatattatagtcaatggcaccacctatcatcatgattacaactataactgttttcatgagaattatgataaatacctaggtctttaattttttattattataattgtatatcatatttttagttgttgtaataatgattttttttacatatattatgatttcttatttttttatttatatatgttttttttaaatgtaatttacgtgacttcttaatttattttagcataatgtaatgaaaattaaattaaaaattatttaaaataatcatcaataattattaacaactaagtcatccgtaaaattcaaaaactaattatctaatgtgtgaaccaatgtaactcagttagtttgattaatttgatttgtttaattctaacttcaaataaagcgaaatcaaccctcaatacgcttttatatgtgcctttattttcaattaatttatactactgatactataattttattgtgttggctttttaaaccacatcaatcgctttatgacttttatcttaatatttttttactgtgcatatttttatgcgttaaaattaatgtaaatacaactttccttgtcaattcaacactcttgtcattagtcatagtggcccacgtggtgtggctttaatttgccaatctacccaaccgtcaaagacttattaacactctgtcctccacccgtggaagagaaggaactgtgatggtcaatgtcaaatcatttccaatacttttacaatcttataggctagagtaacgtcattacaaaagtcatgagaataaagccatttttatacttcaaatttacgtatgtataatcatactttacgtattatatttacgtattatttatcgaagacatcatattttcctttgcgaaagttacctccttaagatgttgaaactatataatgtgaaatgaatatacttatatagttatatacgtagtttatatgtgtatatatagtgggaaaaatcaccacacacggacatgaataaactctggatggaacttgtacaactttgcgtctttggtgcaaacaaggaatgtgataaagtcaatataaggcatattctaatttttacatttatctttcaaccgccattgcctctatagcttctttttagttttgaaattttttctctggatcgcaagtcgcaactagggaaggacgctagaagtggaagagcttttgtttctgtgttgggccacaataagtccttatgttgaatcagaccatcaaatcctcacatctggaatacatatattagcaattactatgcaactaccccatgtatagaattagaaacaatattaaagggaagacaactacgtacgtctttgttcttcgaaactagcacgcattttagcctaatttaggtcatgccgcactagactcgtccacgatctaaactattttgaatcccttaattaaatgagaaaatacacttatgatgtgcatgtgttttataaaaatagattaccatatatttttaagaaaaatggataattaaatatcagacaaataattacgggcattacatgcaagttaaagtttgtttgttcaagtttaaaaataagtgataggaggaaaattaatgttaagaaaagagattgaaacaagggatttgataattgaatttttttaattaatgtctaactagggtttaatttttattttaaatataaattcataattaaagatattattttacttcaaaatgaatcggtctaatgaaagaaaattaatcaaatgtaaaataaaaaattccagaatcctatggttaaaaaagaagaagaaagaaataggaaatgatgatgaatgaaagacaaagaaagttgaacaaatgagatggaggtagaactttgtagtatgtggtggggaccatggttggatgggtaagggaaaaagacgtagatgagtaaatagagttgaatgcgtgggtccattgcaaaatagcacatagggggtgtcagaaactctaccattttaaggcgaacaacatctgcatcaacataatagcacgtggaccttattccaaatttggcacttccctttaaacaagtcacgtcgtaattagcaagtgggctcacattataacttgtgctgtgtttctatacgaaaccccgtctctttcgttttaaatataataaaaattgtaagagtaaatatataagttgttctacaatggattgctacctattgataaaggaggaggactagtaaaaattggactaaaactaaatcgaacaaactttcgttctgcttctttttcctttgcgattgaaattattattttcagttttaactatgatttgtttaaaaaaaagaaaagaaaagttaagatcagctcgatggcattcctgagtacacgcctgtgctaacgcaagatgacagtgtatgaatcaaaagggactttttcacaaaaataagaaacaaataagataaaaaattatttacataaaagttgtaatataaaaataatgtatatgggtgatcttatttcttacattggttgtaattataattaatataaaaaattctttttacatcgatcatatttatcacttttttggttttatatgtgttaattaacatgtggacaaacacacttaattttataaaaaaattagattctagtttaaagttttttattataattatttattagtcctaaatgttttcttttttcttatttattttacaatcattaatattagttttctagttatcgtaattaagacggtgatttaggcttttctcattaactcaattgtaggattaattatgatttatgatttatgatattctttttttacctatgtattccttgtctaccaataatgtactgatgtacatggactgatggacatgcgaatattagttcaaattatttattccgttcatattggtgtctaagttcacatccatgccaatgagtctgatgaacatcttatcatatgttgagtatgagtatctcgactaattcaagcaaccaagtaaattttagtaatctttgcataaactggtaattctgtgatttgtctctcttacttatcatatgtcatatcctaaatattgggattctgttgcttctaatcatattgatggtatagcaatctctcattttttttttctcaaaattattacaacccaaaatttctcatcatatagctaaggtcacaattcaagcacgggtcaagccataaatctgtaatatatttacattttgttgtcttagtacccaatcctcctttcaatttactctcaatcaatcaactcattcacactcttgattatttttaatctttactaataagtcttttttttgtatacaggatcagggtatgagataaacgatttgcccaggatatgaatcaaatgggctttactatatattttcaaacttcattgtctattgattgcactgctgtaaaatctccaagcctcatgcatcatcatctaagtcatccaaatttgaataggtgaagcatatggtaatttctagtcatttcctttttatagcccttgaagtgagtctatatctgatcacttatatatttccatcagacaagcaacacttgtctattaaaaataaagatttaatgatagtcattttagatacatttcttgtttgattatcgcgaaagacttattttttttatttgcaaacaaaaaacatgaatataatttgttaaactcaggtatagatcgataggaggaagagggccatctttgtttaaaaaaatattttcttaatttttctcttgttttaaaagtaataaaatttgttttgactaataaatattccttgtgttccaacaacatggtagttttagagattttttttccttttaaaaggtttttccaagattttcatatataaaataaacccatggtggctactccggcatgtttcttaacttaaaaatgatttttttggtttttcatctcatcacaaaccctaccatcacaataacgagaggggacatatcaagtgagaataaaactttcattaggagaaaatgaaatgagtaaaatcttatccaagtgataaaatcataacgagttgagattaaatcacatagtcatgtgattactttttaaaatggtcatgtcatgatcttttatataattaaccatcatatccatgcatgatctatattgaatccaaatcatcttgaatgaacttcctactgagttatcacaaaacccatctataaaaaaaataaagatcgaaaaacatgtacagccagattttattgttaattctttaaataattgtccaagttaaaattactgtaaattatctaagatgattgcgactcacattatctcttatatatacgttacggaaaaaaaaaagatgataatcttaattagcctaaataatttacaagtttttcattaaatattttaaagatatgctagtagtagtctcaaaataagctttatacaagtacaactgtacaagctacttaaacaaaaagcacgtacgtgtgtataaaaacaaatgggatatatatacaagttattataacttgaaaatttttaatatcaatacctcatcagtgattcctgtttggtcatgatcattgtacctcgttgttattcaaactaataaaaaggactttgtgaaaggaggaacacgactgatgctgtactaccagttcacgatggaaaaacaaagttatgggtacttgaaaagttccaaccaccacacacgagaaaagcagagtttgaaaagcgactgcatatagccccactcaatgagctccattattatgttgataacagcggaccccaacatatataaaagattaaattttaccaattttgtcttgaggtctttcatggttagaagctctgatttgtatataaatcctgcaccaaagtctgcccaatgcaaaatatcttgtacatcatgtttcatagtgcatgctagtgatgactgatgagagaggtacacatccaagtgcttcaattatcaaacttggatatggattcaaatcctttaattattgcaaattaattactctgttgttggcatgccacaaaagtaggtgaggctctagagcagattaaattcaagtacacttggtagagagatgagactttaattaaacttgagactaccttagttggagaatataaatatactgggccaatgatcatttttaggtgttcattgaggttaaagcgttaaacaaatttgttcaatttcagggatgaaattattaacaccataattaaagaaattattgaagagcaaggaatgtcattgacccatcagcaatgttacaaattaacatatatcagttaactggtttgaaagaattacagttttgttagcctatcacatgttacgtcagatacaatttcaatttgtctactttctactgcagccataaccgtaaagtgattccaattttcactaagctggttgaaagtgatgactaaaataaatgcgcttctattgccacatttctaaatggctacttccaaaaatatattgaaagagcagcagaaatttatcagtgttaattgatcaattgactaataaaatcccttactttttacttttaagtttttaatgtgagtaaataaaattagagaaaaagagttatatattgattcaatcacaattatcttatgtaaatttattaacttttacaacacattaattattttaaaagttatattaacaatgaatcatgattagatgacaatgtaaaaaatattttacattatcaatgcatgcatgatcattaaattcataaaattattcttgatttttcagaaactaatttctttaaattgtaaaataatgttttgaaacttaacttgataaagaaaatcctattgataattgaaagtaagttttatcaataacaaacgtttctcttcacataaaattcctttcataaatcatctaagttggtgttgatttttcattttttttaaaagatcgatgttaattatcaatatgttagttttgttaatagaagagattaaaatccatgattttttccttgatttttttaatcaccaaattaatcttataattttatttgggattaatatttaatacacaaagacaagaaggtgatttaattggtatggaaagcgaaggatgatatatgtgaggtgacaacatttatttatgtatggaggtttattacataacacatgcaagccgtatgtgtatgtcacatgcattatatgaaagtcactctcaacttgcctgtaactaagagaaaacaaagggttcaaaccccaacacataaagaaattggcgtgcaacggagaaaagtgccacaataatgctgtgtgaatccaaaactccattatggtcctcactctaccactaccaccaacaatacaatggatcttcgaatacaacaaggaaccctatttaactctagactatagattggaatatacaagcttttgtaatcctctctctctcactcactgtcgtaagtacgatgtttattcctaaagagtactcatgcgggaaaaaaaaattagggatggttaatatcataaacattaaaactactgttacatcagttttatttcatgattttataaaatagttattaattgagtgaatttaatagaataaaatatcaatttagttccttttttagtaaatattattatcagtcgttttgaatcatgatattttcttacgaaaaaacaaaatttagtcactaatttaaataatcgtcatttaatttagactctaaaattgacattacggcttgtcttattttaattgttcatgtaaatatttaaatggattttaatttataaatttacatgcacaatttaaacttgtattagttgtataaaattaatcaaacaaaagtcattctttttactttaatttatatagacatgccattgtaaaaaaaaatactgtgaattaattagaaataatccttaatatgactttataataaatatcataaaaatcaataaaattattgaaatttgaaccaaagagttcatatatcgaaaattccattagtgagttaaacaaaagccactttaaacgtcttaggtgacttttttttatgattttatgagtatataaaattaaattggcattctgtaaataaagtaataattaaaataatcttatcattacttgttacttttgtaattgatcctgatagacggttggattaattatttttgtttttttttcagttataattgtttattgattatgtgtaagaatgaggagttgagtttatacccactcaagaatttctcttcagatttgtcactgtccctataaacaaccatcttaagttggcagatagctgaatttttttaagtatattattaggagtttgatttttaattatgtgaatgaaaaatattttgttgaaaaagataaactttattttagtgatttatgtttaaaaataattagtaataataataataataataataatatatacctattaataaagacaattatctcattttatatacacatttgttatttttgatttactcttcaattaatttttaaaatcatccataattacaagtagtttttgtatactaacttttcaatagtacagttgttataattacatataagtaaaaaaaagataattaagacacggagtgtttgtttttcagtagtaataataatctatacctattaataaatacaattatctcattttgtgtacatatttattattcctaatttatcctttaactactcttaaaaaccatctaaaatgacaaatagttagtttttcaacacaacagttattacaactacatctaactaaaaaaagataattaaggtatgaagtgcctgtttttttaactaataataataataataataataataataataataataataataataaaggcttcatatgcttttgatgatggggttgttaatggatgctccatgcacatggaattttcatgaatattattctgttgcacttttctccatccatttatgaggtggtgaggtacttgacaaagacagcatctatggcatgcgccagatcaatggatggagataaattgcaaagttagagcgtgttgccaaaatttcttaattatgataaattttacctgcaatttatgcatggctgaaggaggatagtttgattgccagccacgaaaatagtagacatgacttccctctatatcctcgattcaccatattgaatcacatgcgttacatggttgcttgacttatcaacatgtgaaacctatcaatccttgttgcaatccacaaaatttttcacatgtcaaaattagaggatttttttttgtgtacttgtaaaaaaaaattctggggtacataattagagttgctaaagacttaaagtcactttaactcgtcaccacacattacacatgggttgatttacttttttatatatatatgagaggactctttttcatgtgaaaatgagaatgaaaagaataaataattgctattaaaatttgttatgaacagctaaaatttaaaaaaaaaaagtttttcaattttttaaaaagaactatattatgttttcgttcttttattttgaagagaattatttaatgcttattttgacctaagcaaaacttatccttttttttcttccttgaaacagaaaaagaattaattttttttatccataagaagttcaagttagatttgaaaagttatgggttggctcaataaaggggggatccggattgatttattgaattaaacagggtaaaacaattcattgtcatctaataccaattatcatatataataagtttatttattttacaataaatatcttaaaaatcatttcaacgataaattataattatgttaatataaaattagtttacaatgcttaatatataatcattaaactcattattctaagtcatataaaagatgtaataggcatatgaatctcagggaaaaagaatgaaccatttataattcataaccattttacggaaaaagattaaagaatgaacattttactgccagcacctgggctaaaaaaattaaatgattaaatcttctgggtattataagtacataacatccggaagttggaatatttgtggcatcatataacccatatcaaaagttaattgcacctatcttccttgaaaggttcccctgcctcatttgagttgggaaggcttaaatgattgccttaggatccgatactccaccatgattcatgagtgtcatttttatactgtacagtttcatcgcataattatgctacaatacttcccatttcacgcctacctgaattaacagggttacatgcaagtgtttggctaaaagatgaaaagtatactacaaagaatatctagttgtgccgtattttcaaccagactttcaggataatacatgactcgaattccaactcctgcctccaaactgctttggaagctacatttaagattttaccacattgtctctctctgcaaatccatgactagaggcaccaacgtgtgacacctatatgaaatttaaaatgtgcaaaatgttcgttagtttatcaacatatattttaatgaatgcaaacatatattatttcgatttacaaaaataagtagcatattttttcagcttcgaatacaaccagaaggaaacagaacaagaaaggtactgaaaacaatgtggaaaaagaagacagaaggctcaaaagtcaacctgagaaaggccccagcaccagtcttctgcaataactaaattacttaggttgaagaatccttctgcattaaaaaaataataatgatgaagaataaataattaaatatcacgttatgtgagtaagcagagagcagattacaaggtattcaggtcagcaaagtcagcatcagcaaaaaataaatatcacgttagtgatactatttactgtattataagggtccacctatatgttgcacgtactgtggtatgttggaattacatactccaaaaccgttagaaactttgactaaccaaggggtattgcagaactcttggggataataacaattgcatttatccaccgatattgactatctccctcttttaatagtggaaattgttataatttgatattaaacatatccttcagttcaggtttagtgtgttgaaaggcaagaataaaagagaaaagttgtcttccaaccaggacacgtgtctatctggattgctatatgcattgctacatctacttttgtgtatataatcttgccattcttcattaaacatcgaaaagattaggtgggggactttgcagtttgcaatttattatctatccaggatatgccagtagcttattatgattcttgtattatattttaatgcaagactgctttcactgtcgtcatgattaattgataacttgatgtatcgttttcagttttcacattcatactaataagaaatgtataatcacaatacaggcgacaagtagtaggcttatatcagattacacttgtcgactgtattatgaagagagagaaaaaaaaaatgtattcaacaaagacattgcatcatatcagctgtaattaacaagtatttggtttgaatcacaatttgtaaactgtaggctacctttggctttaatatcttttgactgtcactgaagtattgatttggatggttaatccctgcatcacacggcatgccatgaagagcttcaaatgtcaaggtgcaagccaactgctcaaacgttatccatataatcagatatcaaatccaaaggttgaaaattgattattgaagttcagcgggttgtgctaagacctacctgataatgtctatttctcactttgtccatcacatcttccatcgctcggctgtttacccccattctgctgagagcagctcttagattctcttcactattaaattcaaatagcgtcaattaaatgtcatatcccaatgtccgtacaaaataaataaaatactgtccagtaaggaatccgaacagaataagcatttccaacaataattaaaaattagtaaattataacccccttcaactttgtcagatgtgcagcttactccctgtggttcgatctacccctcacaactatgcatgcatatcaagatcaaagaacatgaccaagaatagagccaagctttatgctatgcccaaattacaactaaaatattcattacattaacagagtacagacatacgaaagtcattatttctaaaacagtgtagtacgttgaatttagagagggagagaaggatgaagaaagaacagagttttggagagaatacagaatatgaatgctttcttatttaagagagctgtagtgcataggttatgcaagtgatccacaaagacacacacagacacggacagagggagactcctaatagatgcagtggggattattactaagctgatattgatttagtgcaacgtcctagacactaatacccataaacaattagcattttaacatgagatacaagatattacatgaaaatactatttcttaagtgcattatcattttcaacataaaattactaaatatatcattcaagcacttgtttgctgcctacaaactacgaagtaaaaatttgtaagcataatacaggggtttaaattgctcttgaatcaattcactattaggttcgtcaatgacaaaaatttgttattacaatgattgagttattaataataataatcccgaaaatgtatttagcagaaacagaatgcaaataaggtgtagcatgcttacgtgctttagtttatagtaaaaccataacttactcatcagcaaagagagataaataaatattgtagtacagtcaagagaaacaaataatctgagagaaaatcaaatatagattaataaaatataatactatagttgcacttgcaacgccatagacaaaagtctcctacagaatactgtgtccacaaactgcaattaataacacacttgcctaattacagaccttaatatcagttatactcttaatatataactaattactagttattttctatgaataactgccattaggcagtttcctactaccactatgctcctaataaagaatttttactaattattttctatttacaactctcacgcagcagttactcctgccgtttcctattgctgtctgctagtgtacatcttccaaatgggtggcttgcctggtttgcgaaccgaggatttgcctggttcccatcacaatttcactacagatcatagtctttagaaagcaagacttgtgacaccaaaaggcagagttataattttattaaagcatttatcaagtaaaatatactcgacaataacttatctatttcacatctccaatacagaaagcaaaactatccatttgatagcacgagtattaagagtgacctgaaatgtcgataggggcaaccatgatgatctccagctccaggagttgatgaaataatcttttgacaagaatagggagtataatcctgtaacatccatcaaaacattacttgttgaaactcatcatcatatacatgcattatgcatacaaaaacattgaaagtttgtgtttcaaaaaggaaatcagcaacagaaatatatttgaaacatcccataaatcggtggggaaattcaaaacttacagttctcttcccttcctttccataattatggcgtatgttgtatgcatattgtttctcaaacttctccaaaccaacctacaacgagatcttacatttaattaattgatgtaattttttaaaagaaagaaaaaatctattcaaagaccatataaagatgtctagagagatatggaatacattgtctagaccaggtatacatcttcagaatgatttaaaagtattatgaaataatgtgcaaaaattatcagagtctaaaactgttgaaattctaattcactattcatgtagctgaaaatatataatttcgaatacttccatcgtagatcatgtgcaagaagtgtgcttacctttttagagaactctgacctccaaaatgcaagtgcatcatccagatttaagccaacaccctatttacattatcgagaaaagaacaaaagataagagaataaagaagacaaaaggaggaaaatagataaacagtaatcaagaagtaaacggatgaagaagacatctcatcgattttctcatcaatcacaaaaataaatcagaataaaagtgaaccaaaatgtattactttgacttatttctaacccagcataatcatacaaccataaacccgtgttctttaattgtgccagtttacccagacgaaatgagtcaaagtgtcgaaggctgacataaatttcagactcagggtatcataaatttatgggtataaaaaacacaaatttcaattttctccacttatatcttgttaattacttgaaactaaaaaaagtaacttgaatgtcacgataattccagacaatcattttcctttctccaaaccatgtgtaaataaaccacatgtgaagtgtcaagcctcatttaacacctcaaacttataagcatctagactctacagagtatttttatcatgcccagatggaagccaaacgcaaccttcagaaagaagcctagttgcatccgccctccatgctttaaatgattatcctctttcagctgcataaaaagtggtataaatcaagacgtcagacaaaactgaaatacaatataaggactcaatatgaaaaagataaaagataagtaaaaagaaagatattacagatgaatcaagcaggaagaaacacatgagcataatttttcccaatctctaaccttatcaaataggtgacgcatgcacaaaggaaatgagctcttggcaacttgatctatgtcctttaatgatatatcagcatattctcttgactgcagaggttttcaatcaaaatgaacattgtcaatcctcaaataaatacctaataacagaaataaaaatgaaagaatatactatttgaattacctgagaataatcaggacccagataacttgaggacagagcttccacaatctacatagaaagctagtcaacttttataacaaagaaaggatatattgatatacaagaccaaaacccacacgtacaggagtcaacctatgtttctcttgctctctaattgaagatgtccattttctgcaacaattagatgaatctctaagcatcttaaatcccaaattgcatttaaagaaagaaatcaattttgcatgtgagaaaatttattgagatccaaatgaccaataaaacctgtttgtaaggataagtgcctttgacagctgactgcggaatagtgtggctacaagtgaaacaatctatgaaggaggcaaagttgaaacacaaacaagatttactataaccaatactctgcgattcattgcaagaataaatagtaagtaattacactagtcaacctgattcattgcaacatatgcatatccttgatttataaacactttccgtccagcaacaagctctggaacttcttcaaacggtacctatatggaaataaaagaaaaaatatacaaatgttgcaacccaaaaactgagggagaatgttagagatgtcttctctcacaactagaggtcgtgagagaagacatctctgtttatcactccctctctcacacaaaaacaagcttttgaaaaaaaaataccaaaggataattaattactatttcctaacagttttttttatagattcaaatatttttaactagttaactgctttcttttccttttttgtgaacaaggaagaatcattagaattcaatatttaaaacagtcaccgagttaatatttaaagtagaactgcatgtcacccggtgcatggatctctcttgcaagacaataaataagtacgaaaaagaagattgaacacataccttgtagaagatagcatcagctgcaaaaaaaaaagtaaatgaagccaagcaaaacataggcacgttagatttggaaaagtaataaaaaccaggaaataaaacttgaagaaaaaaaatgaggcataaatttcaaaaactgtagattttttcttgtataatagtagtgcaaatataccacttgaaaaacttccctagatatctttcttcagaaattaacccatgcaactgctagctcactagtggatttacaattacatactaaacaaaatctaaaaaaagatgcgccttcgctcttaggtagcaacagctagttatattcctattcattcaacaacctccagcatggtgcatgcaaatcatttctgctgattcataccaatatgctaaataatcattgcaaaaagaaaaagcaatgtgctcctaccagtaggtgaaggctgacccatagaacgtgcaacttgtcccaatttctcttttatgctctgaaaatccaaaacatcatttctttaggtactaagaggtatttgtaactcagaacaaaattagttttgcacaaatcaacttcatggtaaaattcagattcaagagtccagagcaaaccaataaaacaaatgatgtgactacctcaaattccacattgctaacagccctgtaaggaaggtcaaattcttccatgactgccctctgtgcactcataaacaaagtatatgatgaataagtacttaacttcaaatgcaaaaacaatatagagtaaccagattttacctgagcttcagcattcagaagacgaaaacggtagcgaaagagtgcagattccatggaaagaaaccatttcctcaagtcctccctgggaatacaggcatatattatgtaattttagtatatatggaataatttagaaatatttcttacaacagttttcttattaatttgtctttttcctttctttgatctgggtaaagcatcattcaggattaatacacttacacaaccataaaatatgatcaatatacgtaattggtgccaatggtcttaaactctcatcattaccaatttattcaatttgtagtaatcttccatttattttgatcaggcattattagtcacacaaccgaggattcttttcaatggcatggaacaacagtaaaagagaatgcacaaaagagagagaagataagagctcttacgttctgcaatacaccagacgtagaacaaaatgagatataatatccttgttcagaacctgagttgcgtcttgatgtctcatattcactttccacaggtcctttacctgtacaaggggtgattcacatggaaaagtccaccacacagcattatttcttttttgtcaaccacaagacatgaactaataaattaatattgtcaaatcgagctttttaccaaattctccatttcttccgctttttttccccgcgacataccatcagaaatccccttgagaactgcaacaagcaataatatccatgaaaaacagaccacaaaacttgaaaaatgtccgatgtcaacggaagttaaagaaacacatgcaaacacacacgatttcatactaatttaatatatttaaaataaaataaaaaaacaaatcgcttgcagatttcaggctttcacttcaacatgacactagtttcttaaatctaggatatatgtgtggagcagcggacacagttaaaagcagagcagattatcgaaacactaggcacgaacagagaggaaatttgaaacagatctctggaattggaagaagcggaaaacagtgaaagtatagagatgaagaaaacagacctcggaggcgatcgatggcgaaggactcgaaatcctcgagcctgacttcaagtgggggagcagagcgatagaggagaatggtgggagcagaaacggcttcgttggaggaggacaacaagtttctgcgactctgaggacgaacgatctccatcgctttctttcttctctctgcaacactcccaatcgactgtagactagagtgagcgtgcgagttgcttccctcccaggttctgaatccgcgccaaattatttggccctggggcacaaaatggcgggaaactatttacttttatttgggtaaatgcaatttagttcatttagtttatattcgcttataatttccttctttttatgaaattacatatttagtctataaatgtcagtggtcacgataatttagttcattaaaatcattctttttatgtttacaattatagcctacatgataaagcaaatatataacatatgggactaaattgtcatgaaaattaaaaagtgtaaaacatcacaaaaaccatccctcattcctctcttcttgttgtcgcaatgcacaccattctaggcaccggttgcgcttcctctaatggccacttgcgagagtatagaggtttgccacgcgaccaaaacacgatgtcatccccaccacccaagacctagaatacaaacacgacgcacatccttcccaatgtcgattgcacttctatcgggtgttcacttgcgaatacaatgttgtagacatattttggaacattgcattgacatgtgtttagacatattttggatatatttttggaaaattctattatgtcagtgacactgtggcatgttttggtgtcttttgttttcttggtaatgtacaatcatggtagaaattttactactacttgggaacttgagtatgttatgtgtaatgaataacaattttatgttctatgaatgctcattttagctttgtggactatgtgcatgttatattatttcatggatgattctactactgagtgcatattattagttattttgtggactagtttgttagttaataatatttgttagagattaattttttagtaagtatatatgttttggtggaaattttttagaaggagagttcatttatatgtggtcattatgtttgttaatttgaaaatcaatacattaagaaaaaatgataatttaatccaaaatgaggtagaaagttactgtacacattgtacttgtcacgtggatgaatgtgagacatgtaggctatgtttgttagcagaaacacaaggattttaacggtttagccaaattgtcatggcctttgacatttgtggactaaatagataattttcataatacagagacaaaattgtgagcaagtgtaaagtatggggactaaattggtcgtatactttttttattattttttaggcgtgctggataatggagtgattaatgttgaaaatagaaaaaatcataagttggttatattatatttacggtaataaatagaaatttgttaaaaatattgtaattatttattaaattttatagttttaaaaaaataaaaattatatggatattttattaacatttgtttatacttaagtttatacttaaggattgaattttctctctctaaataataagaactgaattattctactttattgacttttgcttgaacttgcaatactgatgtgttttaacatttaaatttagtttttacaatgaagtatcttgattagtataattgtgtagagtaattgtatatactatttgaatagttttagttttaactttgaaactgttttcaaaagagaatcttacaataaaatatttttaaggcttaactattttttaatctctaataaatattcgatttttatatttgtttttaataattttttattttatgtaaagtctctaataaaataataattttatttttttttttatcacttgtttttagtctataataaattaatgaattttatttttaatcttgataattttttattattatttgtcattagtcgggattaaaacaaaatctattattctattagaaaatataaaatttgttaatttatcctagattaaaaaaattatcaaaaataaaaaataaaaatattattttattagagactcaacgcaaaataaaaaatcattaaaaataaataaatatatatatatttattagagataaaagtatatttaatttttttttaaacattccggaatagtattgaaaaaattcacatagccgcataacgaacacccgtccacgtaacgagacacccaactccgtcatccctaattgcaagagcagaaataacatcatactatcacctgcttaaattttagctatatcaatcagtcgtctttttctttttttagtgtaattagttgggtcaacaaagcaagaaacacacaattaagtatcttgcaatggtataattaagatcagttaggcgccgtttgtgcggtgtatctcccattgattaattttcttctccagggactccccccacaaaaagatagaacaaaaaacaacatccgacattgcgaataaagtgagtagaaatttgtgcatgccaagcattcctcagccacagtgacgacgccatatatattccaagtggaacctaatattcaaatcgtatcgtgtttactaaggtataaataactccacaaaatggtatgacgttatatattgcaagtggaacacctaataataggcaaaatggtataacattaaaatcattcatatatatattgcactttaatgtcagaccgttgtttcgggccaaaaacttggatagtgttttatgttgaaattttagaatcgaatatcaccgctattactgatttgaatctctcacagtggccatcatattttttcctgtaactaatgcaactcttttttgttacatttaactaatgtaattaactttgcatctagcaatttgataatccaattcagaatcaaatcaaaatctgggttggatggttaatggaaaaaggaagtgaaaaagagttatggattcgatcacctctactaacaaaactaacattgcaactaacatttttcgatataaaaaaaaaaaaaaattacattgcaaaaattaaaaaggtgaaagaatataagattctctccaatacttgaagccatctcgctgaccctttcagaatatttattcaactataaatacactcctttcatgccatttggttagcaagtctcagcaagcatcttagtgaaccttgcttgagttgctattgcttttcctaaactatgggaacttgatatcagtatatatgttgaccaacatgttgaaatctttgcggaaaagcctaagccttcaacagaaatgtctccagcacaagaaccaagttgataacgctgagtcagtgcatggtgcaaacctggcaaattgcattttttgcgtggaggaaactaaacaatggaagtgtgaccaaaacaaaattgaggatacaaagagtgcagaagggggcaccaatttagatacacagcatgactctgaagtcaattgttctttcactcatgctgtcatcaatgtggtcgggatggtaaagtttgcactgttgcttacgtaccatttgaacgaacatatatgaatgtgcccttttagtctttttagctagttactttcaattatatcatattattgaataaattagcatgttcaatctccatttggccattacatttgctaaggattgaaaaattgcatggaagtatgaaactgaaatcatattatatttttagaatcacaaataaagcctacatttatttcagtcaacctttgagcatcatataatataagtcttatttcaaatttcaaatataaccactaggtgaagataagtaacatgagattcccctacagactacttatatacacgagagaactctttcaatgatgctcatggcaagattatcatttttttttctttaatctaacagaaacttctataatcacccactaattgaaaattaagaataataaaggatctagtgacatcataattaattgtaatcgctcagtattgaaaagtcaaaaccgaatcgcagcatatataggaaaaacaccttaagtatactttagcacatataatctgacactgtaaataattagttggaagttttgtatgtttactccaatatactattcgatccctatatatacacacatgcattcgtacacacacatttatttatttaacatatggtataatatcttgcaggtctggggcaattatcaactccatatgctctagacaaggagggtggacatctgcttttttgcttataggactcggtgtgatatgtgcatatagttctcatttacttgggaaatgactagaaaagaacaccaagttaagaagttacgtggacattgagggtcatgcatttggtgcaaaaaggaagattcatagctacaactttcatctacatggagatcttcatggcccttgtttcctacaccatctcattgcatgacaacttgaattcaatcttctcagggatgcatctgaagctgcaattggcaaaactatctaaatcatagctcctgatcattggtgcagtgttgattgctctgcctagtttgtggctcagagatctctcttccatatctttcctttccaactggtggcattctcatgtcccttgtcaattttgtgtcagtagcatccactccaatttttggacgtgttcaagttaatcataagatacccctcctccacctccacaacattccttcaatttctggcctttacatcttcagatgatgacacattgtataaagccatgaaagacccctcaaagtttaccaaggtaaataatatatattatatgagtttaatgttgatgaatatttttacattattaactaatttaaaaataactttttttatatgacttttaaagtaaaagtttattaaaattcattgatttttttttaatgtatggtaaattttttaacatttatagtaattacctttaaaaaatcatgttaataataatttcttattgcaagaaaattaaattctttgaagtatttgttttttgttaaccctttaaagtaattagtacaaaagttaaaaaaaaaaaatcaattatattaccatctatgattgactaacaaaattaaattcatatgatgtatgcatagacagtatagttgttcatcaattgcttaagaataggatgagaaaaaaaatcaacgagtgagattatgcttaaaaaatgaaaagattaatgagatgtttttattaattattatttttctaatttttcaatttgggaattcaggtatctatagggagcttcacattagttacattactttacacgaccttgggtttcatgggtggcaatatgtttgggccggatgtcaattctgaggtaaccctcagcatgccaccaaagctttttgtaacaaagattgctctgtgggcaaccgtggtgacgcctataaccaaatatgccctggaatttgcacctttcgctattcagttggagaaaaggcttcccaagtttaacagtgacaggacaaaaatgataattaggggcagtgtgggttcatttttgctttggttatactatcccttgctctttcagttttgagcatgtattcagcctcactgtttctctactaagtgttgcaatttgtttgattttcccatgtgctttctacataaagatttgttggggtcaaatattttggcctctctttgtcctaaacctctctgtcatcacatgtgggtttcttcttgggtcatgggcaccatttcctcctcaaaattgctagtgaaacattttctacaagctcaatctgcttgaggcaattggaatgattcagcacatgtatactagtatactaggataaggatgtatgaaaaattgtcataaaaaaaggggaaatcactatacttgtttggtgggtactgcgtagtattacatactttgtacctttagacaggtaatatgtagccgttgttttttttttttttttannnnnnnnnnnnnnnnnnnnnnnnnnnnnnnnnnnnnnnnnnnnnnnnnnnnnnnnnnnnnnnnnnnnnnnnnnnnnnnnnnnnnnnnnnnnnnnnnnnnnnnnnnnnnnnnnnnnnnnnnnnnnnnnnnnnntgattcagcacatgtatactagtatactaggataaggatgtatgaaaaattgtcataaaaaaggggaaatcactatacttgtttggtgggtactgagtagtataacctactttgtacctttagacaggtaatatgtagccgttggtttcttttttttttttttatcattgtataatgtctttgatattgtcaataaaattcaattataaatagatatattagaagggttaaaataaaattattattttattaaaaaattgtcaaaaaaatatattagagactccaaacaaaatttactaatagaaatttaaatcatatttaagccaaaagttaatttcaaaagattaaaaaactaaaaggttgaaaatattataattcaacaaaggcataattgcaaaatcagaatattaataaaaaaaggaaatgttaaattagaaggatttaaaaatttaaaattttgaataagtgtcacgtgaattaccataaatgaaaatttataaaatatatagagataggtgaatttaatttttatgtatttttattgtaaatttttttgtactaataatcaataaaaaattatgatttactgatttttatgataactattnattaccataaatgaatttttataaaatatatagagataggtgaatttaatttttatgtattcttattgtaaatttttttgtactaataatcaataacaaattatgatttactgatttttatgataactattctaaaaatcaatacaaatataatatgttaatttataatcgtttgacaatataaaaattctttttagtttcatataccattgttgtccttatattgtttattttttttataagactccttttaaattatttattacattaattattttttgacaaaaatatccttaattannnnnnnnnnnnnnnnnnnnnnnnnnnnnnnnnnnnnnnnnnnnnnnnnnnnnnnnnnnnnnnnnnnnnnnnnnnnnnnnnnnnnnnnnnnnnnnntttttgtagtcaataaacaataaatgttataagagtaattttgaaaaataatacaaattatttataaatttaatattattaactaaattaatcaactttcttaacaagttaaaagaggcattaatcgtagtaaatttttatttttacctttgtcaacgcgcaagtgaatttaaatcaactgaatgaacttattgtggacactaattattaattagtaattttgatttgttgacttataactttctttttctggtcaaagacttgtaacatttaaaagttaaaactgtcgtactaaacaatgtagatgatgtataaaaataatggagatctgagtttatttgttgtattgaccttctccacctttagttgtggttccctaccaactttattccaaccgtttttcgttaccttcgttttcaggcccacattcaccgtgtcacactgttcccttatcttaaattcaactactagtaattgcttacacataataaacctctgaattgtaacttgtaaggctcaatttcattggcaagaggcatatagaattatcctcaaagaatagccaagaggtcttattttggcaccacttggaagtgctaccaatagagtttgagacaccactgtgtctgtgattttgaggttgacaatgtctgctgctgtgtctgcaaccaaggattttcccttcaatgctcatttggaggaagatatcaaaaacaaaggaagcaacaaggttgttggggaagcagaccagcttccttacaatgatgatgctgaaggaactgattcagaggcagaggaagaccccaagttggaattggatcttggtcctcagttttccctcaaggaacagcttgagaaagataaagtaacattctttttttcaaatgtttcttcactgccctgccattctttgtatttgtttgttatgtttccaactgttctatgatgaaagggattcaacaatttaacaatttttcttttgtttctcaaaggatgatgagagtttgagaaaatggaaggagcaacttctgggaggtattgatatgtctgctgttggaggtacttgttttccttccattttgtttttcttctggaacaactctatcaaagtatcaatgattattaattaagtggagatgacgtgacataaatagtgcatcagtattgaaaactcttcttgaagattgtcctcttcatccaatttaatttctttgttcatataaagcagcattctcctggttttcgtttacaagatatccctttttttcactcacttgaatcacctttttttggagatgacaaattttgatgaaaaatgttggtctaggatgattttaatcctacctcttgttttaagcatatttgaatcattaagtttgatttcagctccttattatttttgagtcctaaataacctaaaggcaaaagcccttgtattgtacttcagaaaacaaggagccagaagtgaagatagtgagcctcaccataatatgtccagggaggcctgacctcattctgccaattccatttacttctgaatctaagaagagtatcttcacccttaaggaaggaagtcaataccgcttgaaattctccttcactgtctccaacaacattgtttctggcctcaaatacaccaatgttgtttggaaaactgggcttagaggtgagacataaaaccccttttatgttttagattagttaaacatccgtatcttgatcgaattgtcttagttacatgtggctttcatgaatttattgaaatagtagacaacacaaaaaagatgttgggaacttatagcccaagccaggaaccatatacatatgaattggaagaagaaactaccccttcggggttgtttgctaggggaacctattcagcaagaaccaaggtaagaatattaatttacatcatacaatatttattcactgtttgtaataccctccgttctaaaataattgttttctaggttattttatacagatccaaaaaaattaataaacaaataaaagagcataacaattttacaaaacttatcttaatataacattacattgaaaaactaatctgatacttattaggagtattaatggaaaaataattaatattacgttaaaaagtcaaacgtgatatttattttggaacggataaaatgttagtattgttgcattttttagtaggaagaactaactattttttttttgtttcagtttgtagatgatgatcgcaaatgctatttggatactagttaccactttgaaattcagaagaattggcctacacccatctaagattcaatattaactaatttattggtggattttcttcctttgtcatgtatctttctgggggagattgcaatccaactttttgtttattaatctagatagtcaattgttgacatgcatgctacatgatggtgttaatcctctccttctattctatggttccttttctccaatctaataactataattcacataaaaggaaacgctagctcgtgaaaatcgcactcattccacctatgatgcttcaaagagttaattgttattatctgttaagggtgtgaggtgtgaagggatgggggtggaaatggaccccatgtggataaaggaacagaaatcaacaaatatcctcaactactgtttgtgctttctcaagcaaatagccaaaaggtccatcaattctttgatggtccagaagcttttgtcatatgacgaccacatgctgtttgctaacggtggaaatccgaaaaatataaaagaagggaaaagcaaaatttccattaaaataatttattaagaagattgaggccatgaaccaaaattttaatatactgtaaaaggtatcatttataaacattttgaagctgcctttgggcttaaatttgatattctgagttcttcagtaatttgttaatctttgatttgtccaaattatatgtgtgatttcaatataactcttgtttaaaacatttattttaaaatttaagtaaaccaaaaaaaattgtcgactatcgtgtatctgttacttgagttgttttggtgtcaagtaatagttttaatagtattttattctccaccaactctaattctagaactaaacccgtaagttatttctaactaaaaaaaaaaaatattgacctnnnnnnnnnnnnnnnnnnnnnnnnnnnnnnnnnnnnnnnnnnnnnnnnnnnnnnnnnaaatattgacctctatattctgaaatcaaatattgtacgcattttgttagcattgtttacattgtgtttgctagttaggaaatcaaggagaaaattttattgtatttggttaaaaaaattgtagagaaagaaagaagaaatgaagaaactaaaacctcccttattttgtctcctctgttacattagagatttaaaggagaagaaaagtaatttataatttttaaacagtacatattaaattgtcctgtgatattattttatctctgatatcatttttttnnnnnnnnnnnnnnnnnnnnnnnnnnnnnnnnnnnnnnnnnnnnnnnnnnnnnnnnnnnnnnnnnnnnnnnnnnnnnnnnnnnnnnnnnnnnnnnnnnnnnnnnnnnnnnnnnnnnnnnnnnnnnnnnnnnnnnnnnnnnnnnnnnnnnnnnnnnnnnnnnnnnnnnnnnnnnnnnnnnnnnnnnnnnnnnnnnnnnnnnnnnnnnnnnnnnnnnnnnnnnnnnnnnnnnnnnnnnnnnnnnnnnnngaggattgaacaatcaacttttcaattttcattctctattcttggtagttgatgttagtttgtttcacttttcacttttgttgtgtacaatttatatcatatatcaattctcagcctgatgagagttaagagctttttttgtttatctatttatttacagaaaaaaattaaccttaaatatcataatatttacaacaaattctcctcgtatatattatttagctaaccaagctaagcctcttaagagtttaattgataatataaaggagagagaaattttgaaactcaaaaattcaattttcaattcatattcttttttcttgtagtattattttctttcatccaaataaaatatcttaattttaagttataagtgaggtgcaaagaacaataaatttagatgagaagaaaaaattaggaaaaatatatagtaataatttattttcttttattaattgaaaagaaaagaacaaatattttaaaaatatatatcctttcatttatctttcaattgaatttttctctctgttttcattttctttctatgaaacatactgcagaaggttattctgaaaggatcatcgaaagtcaatttatttcagttttgccggcaccaagattttcactcttagcacatttgtcttaaattcttgaataataatttgacaaaattatatttttagtttccaaatttttgaatgtttatagttttggtccttaaattttttgattattagtcaaaattttgaagaaaaaaattacaatatcccaaattcgaatatatttttcaaaacctatcttcttctccatcaccgagaagaacaatccagcgaccctaacttaatttttctttttcttttttgcaacctttcctctttcatttcactgaacaacacgttgaatccaattttaatcaattttatttcagtgcccaaattaagcacaacagaatcccaaaacataaagaataatagaggttagggtccctgaagcttcgagtggttgtacgaggcaacaggtgcgcctatggtggcagcgacaccaagcgaaggagatccagggattcgatgggtttgacatattgcgaattgggtagctataggaagtgcaaaaattatatctttttggagtaagatttcgtgggtggttttcgcaattcaaagggaaaacagtgttgcaaatgtagggattggtgagaaggggtttacaagcaaatgttgtgaagatagagattcaccgtctagtttgtgggcgtggtgttggtgggagttgcggctgggttgagggggtagaggagggcacaaaggggtgaagcatatctggaaaatgaaacccagaaaaaatgaggacataaatttagtttgataagatttttactcctttgtatgcataatgtggttgcaattgatttgtttgaatgtggatcacaaattggaatgtaaaagaggcatgatgattcacggctacgttgttcaatcaatatttacatctttagttttataccaaaatcaattaatttgtagccactaaaaatctttaaaaattaaaaacataataaattgataataaaattaaacgtcccatcaaaatcattggatgtaaataaagtttgaagactttgattgattataaaaatttaaggattaaaatcataaatgttaaaaattgaaaaattaaaaatataatttatcctcaaaattttaatctcaggtgatagatggaaatcaaaatttacacttataatattaatatgcaagatggtaatattacttaccagtggtcacacccgagtttggtcaaaagacaaaaaaaaaaaatagtgaaaatactttaattcaggtgcaagtaactcgagtatattctcgctgaccaaacgagacatacgttaaggttagttagcacttgaagtgttacacgatgcgttgatacccctcttcgcatagcactcctattacagaaatgtttagtgtgaaaccgtgcatgcatcatgcctatataggcatgtttggattctctccaaacttgacttgaaaattatgtttagttgtagttaaattatgttctttaaaacatgtttggttaggagtaaaaaaaagtacaacttttcggagagaattttatattaatgtagacttcttattgagattaaattttcaaacatgtattaccttactttaaaacataattttaactaaaactaattttaacataatcaaaaccattcaaaatcaagtttaaaaactcgtcctaacaaacaccaatgtgtcctaccttctacatgtgccatttttttctatcctgcaaagtgtgaaagcctgcctctttattttttattccgtctccacttgctcctctcttgtagatcacaatttggtcaatggtcattatggtacaggtagccatttttagcgaaaaattatttaaaaaataataaaagcaatggttttgaccattttgttgtcaattgagtcctccaatggtgtttccgttgttaactttttctgctcatttgctgtacactagtcttgttggtcattaaagtttagacccaacgcaattagtggacaccccatcaaagattcctttctttccaagtaaagttgcataatttactattataattatcacaataggaaacaacccttgcaggaattacagttgctacttatcaatacacgaaatataggagattggaatacattttgaggttagtgatcgtttagataggtaaaacattgatcgttaatataatttttaaaataattatcataaaaattaataaatttatcatttatgataaaattattattgaatgacagtatcaatttataacttttttttcattgattttatctactaatatcacaatgatccgtaacattacacaattatctatccaaatttaattataataatcaattaggggcatgtaaaatgaagtataatnnnnnnnnnnnnnnnnnnnnnnnnnnnnnnnnnnnnnnnnnnnnnnnnnnnnntttttttttttttttacttgaaaaaaataacaatatgaagaaagctatacattagcaagagcatgtaatagatatggtcaccattttccatctttccactgtatcctttacctcctctttcttttccttaaaatgattgccaatgcattgattttcaggtggcaaatgtcaagttaaagacatacagaaactgtcctaaactcctaaccctacagatacactattcctgtgcacaaagaaagttggtttgataatattttatggtttaaacacaagtcagttatctgtgtcttttgatctagtgcaacccgcagccaatgcatgcaaacctgtcccaattgactaaacgtaaaatcaccgatataaatttactgctcaagtcacgtaatatactgtttagctccctttcatcgtaagtgataagcctgacagactatacacataggcattgtattaagagatgagagcacgaaagaaactaattttgatcatacaaccaaatatcatacaatcaaaatgaatgaccaagatcaaatttaggaaaataatcttcactattcatatatgtttggatatctaatattaactgctctcatctcttatgttagcatattacatgaaggatcagtgcctgagaagaactaacattgaccatataattaaaatggaaggtcaatttagtattttagttaactaaataattaagataatgtttggtttgatattttttttttttcattttcaaagaaaatagaaaacaaaagtggcaatacctttatttaaaagttaaaaaaaaattgaaaatattttaaaaaataagtccaaaattgaaacaacaaattagcattttttgaaaaagtgaaaacacagtggtaccttaaaatactttcttcaagttttctaaatctttaaaatttgaaaatgaaaattattttcaaaaaatattaaaaaaattatattcactcaaatcaagtgtcacctaaagtatcttaatatcaaaagacttaacatctcttattatcaacttatcaacgactctcataatataacgtttcacacggtgacacttcacttaacatttttgttcatcagactcttcagtaagtaaccattttccagacctcaacaaccagctctgacatcacttaactggtctcaagatagattacaaatacaagactttttagcgagttttatccttactcagacactttttgatttttttttaaaagatcattcatatcataactaattcaaatcaagtacacttagttatgacattcttaggtgataaattatcaaaaagtaaatacatcttgtttttatagataatatcaattaatatctttaaatcattttcaattgcacaatattatacctacacatcatctagatctcattcttgtgtgatttatctagagtattacactcctcactatgcaaaagtatgggaaatttagagaaatgagaaagtatcattatatgcaactttaatgcttgcatatgtacatcaaccgttttagaattcaaacctatcaattacctagacacaactttccagttgtcctaggacttggcatcacccatattaaatttaaaaaaagtataacataatcttgaccatatatatgtataattatacagtcaacgttaatttttctaagccactaaatatgttccctacacacatcctagtgtcttgatacaaaagatttgcaagcgccccatttatatatttgcaaatatatggtttaatttgtgttttcttttttccattttccccataacttattcacgatgatgatttaaatactcaacatttaaatgtatccagaattaacagaattgtcaaattttaattttctattgcccgatgtgaacagccactcattttgtatactgtcctgtacacagcctgtagaaagaatatatacaagtgatcaatggtttcgaaaccattttaagcaacacatgacaaccaatataccatgaatagaatgaacggtaacctgaaatcaccaataatctaacaatgcaaacttcacttgtaatccaatcttaccaccatcagtcactagcttagcagctgttaccaaccaatggccaggagcatcatgtgggcctcgcacaacctcagctgtctccacatatttaagtagtttaccggcacgaactggcacaggtggaccatctggataaactccagagttaagtgcagttggagtctgttttggaggaccagtgttaccgtgctgtgtgaatgaaaatgttgtgctcaaatttgtgagaaaagatgattttcttgaagcctctggtgcagcagtccactctgacttccggatactgcaattgggaatatgagcaaagagaagccgcagatgaagcacattccttggccagctccctttgctaaggagttgtgcacctgttacaatataaacacctccagaattattcaaccagttagggtcatgcttaaccactgctgtgcacacatttgagaatctcttccatctgattcgttccagaaattgatcactggattcattatcatcagatcctcgccacatcgatggtgtacttgaggttgaggttcctgaagagaggatcattttatttgggaggcttgaaacatgatttatatgtaaagcaagtctgtcacatttcctgccctccaagtacatgcgcatgccaaccacaggtttttgttcacttaccacctgacattttgtacaaaataccataattaacaagagaatattgtgtgaacttaagaataagggatcaataattcaagatcgttgagaggagaaaataaaatcagcgaaaatccctaaaaagctatgcagcacatagaatgaagaaaacagataaataactcataggtggccaggagctcgcataaggtcacatgagctcactgctcacattttatgacctgttcgaattgagtgtatttccgagttctgtccaaaagaatcacatcccaaaattattagaggtgagcagaagcttacacaaggtcctgaagctgctgatccactataagcattgttacatgtgttttctccttaactaaacaaaacgcgagaaaattttgaaattgtttcttaaagtcaatttttctcttttttctctccatttcctcttttaaccaaataaagaaaatgcatagttaactatgttatctcttaaccaaacatacactaaaaaatgatctcgtcttaatctttgtccaattaccctttgctacagtttcataataatgctcataagcttaatacctctatagctgggagaattctttctatgacccttgttcaattacccttatgtatggtttcatagtatgactcacaagcttaattgctctttagttagaaaaatttagtaatatctcgcttgttcttataaatagtaatactgttcctccttaaatgtagcatcttcttagacctcattatcttgctaaacaactttgtgaaccaggttataatccttttctcccccaaacagcaaccaaactattcatgtgccttccctagtagcttgagctttgagaatagtcagttgactcagttcataacagggaaattttttggtccaactactttacaattgtccatcctctttaatgtttcttttaccctaaactacagcttactaccaaaaaaaaaaccaataaaattgtaagtatagcataactgcagacaaaatgctatagatagttaaatccaacacaattggcatgcaaaaataacctaggggcttaaaacttcgtagtgttttcaagaatttccttacatatttctcacgacaatttgttcgaaaatatgtaagatatatttagattatcttagaatatctttcttgatatgttcctataggttctatagttctagtgttattatttgtaggcttgggctaatactagtaggactagtaccttacctaattagctattcagataggattattaagttaaagtaataccagattttgtttgagtttggtgtctatgattggaagaatgcaagtcttgtaggcttgggctaatactagtaggactagtacttgacctaattagctattcagataggattattaagttaaagtaatactagattttgtttgagtttggtgtctatgattggaagaatgccagtattttcaaggatacttttagatgtcacctatttcatttttgttttgtggtgcaattttagaagggtttctttattgtgcaattttagaagggtttctttattgcatataaagagattatatcttttctttgctcaatgtatttgggttttcttgttaattcctttcatttgttattattttgtgatttcttttaggaggatatcttatcctcgtctctagtatttctttcataatctataatgaaatttctcttgggggggggggacaataaaacagtgtttctcacaacgagttatctttcggtctgaaaacatcccacaccttgttcaacccctgaatcctaatcctaacttgatgccatttatttcagactccttcctattctctgacaatacatatgaaataaggtgtacaagaaaactcaagggtagcagactaacaggtaaagtaactgattaaagaattaggcaggttaaagaataacaaattttttaccccagctaaatttgtaacataacagaagtgagtaacgggaaaatcctgacactaattaagcaaaaactttctcaaggaaaatattaaactcaaatgtaagagtaaagtctaacacatacaatacttgctcaaacacaaagagtttggttaacagtacctgtgtagagattatatgaagctttggacccatgaaactaaattgcagggaaggggaagcagtctttctattctgatgcctgagaggcagctcacaaaacatgggtgcccattgccttggaatttgaaactccagaaagtattgtaaatctccgggagaaggcttatctgcagagagtaagtaaatcaatggagtgttgtgcacctcaacagtaaagaaattaaacagtggtctgtgcaagaagcgatggcttggaaacttcatgtaaagaaaagcaaaacatacaagaacaatctaagagnnnnnnnnnnnnnnnnnnnnnnnnnnnnnnnnnnnnnnnnnnnnnnnnnnnnnnnnnnnnnnncttcaacttcacactacatacggcttatgccttaaagttcaaaagacatacaagattccccaggtttcctaacacatgtgaaacatctttggtctggattttatggttgcatgacaggcatatgacatctttgttaaattttggatggatgcatccatcaagaggagcattcaattgaccatcttgcttgtttatgtttaaggaataaactgtggacataaagttgaagggtgtaacttgaactcttcctcttccctaatttttatttcggagtttatctacaccatggtgaaaatatataaatagtaatagacataaaatggattaggataaatgtagtagattatagtatcattgtttaatcagattagaacatacagcgtagatacagattgattgcatgactaagatatccacttccaggaattccagtcagaagtgaggaaataggaacaaacttgaagaggattgcttcagggttagacggcactgtctgaagccaatttgagtgactgtgcttgaacatatctcctcctctttttgagcaaataatagtgaggccctgttccaagataaagcaatatattcacaacctagaaaaattatttatttcaaatgaaaattatttccctttcagggcttacatccttgcttgatgtttctgaaatactagtgaattgcattgtgtttgattgcatcacacggttaaagacctcagggacctacatgaatagagccattgcatcagcagaaaaataataaataccttaaagttacaaaagatagcactataccttctgttttccatctactgtcttcctctgtagtaaagaagggcttctgacatctgagaataaaaaatctccaagatcctctaaatgtcttctgagatcaccaggaggaatctttgaagaatgtttttgtttgacacagattacatcttgacctcctacagccatacccactattatgtgtgtaccatatgtctggatgaacctgcctaacaaaattgattagcatcatatacttatcaacccaaaattatgcaccattcaaactgtcaaaataagttactgcatcaaacagttcacccacaaaacattcaaacatgaacacacaaactaacatcaactaataaaagttaattcaagcttcatgcgaaggtaagaagatattaaatcctttaatcaaccagttcatggctaccaaacatactagattttgcagggatggtcataaccataagtgcacaaaaagctagcaacaaattgaatctatcaaattcaatcccattataatctgtctatctaccaggaaacgaaactatttttacaccaacaaattgaagttataaagctaaaagaagctattttaacatgaggaaaacaaagataccataatctgtctatctaccagattgttgtatcagcttagtgtttacctagacaacgaagccggatcccactgagccggaacagacttcttaacctcctcttgcagtatgagtggagaagcagtgaggtgcaaatagtagagtgaaatgaaatacccatcaaaagcaaggtacttggtgtcagcagcatcacgaaaccaatccccactcaaatcaaagagcgcattaaaatagccagaaggaactttcccttgcactgctgatttctgattaagcaactcagacatctgcagcaaggagaaaaacgcagagtttaccaaaaatgcaacacaaacaaacagatcttaattcaaaaacgaaatcctcctaactcatctacagtaacagataaagaaggaggaggagaaaagggacctggttgaattcaagtacatcagacttgaagcgtattctatcccctttatcacaacgaatattctcagaaaccccttcaatggtaacacctccagttccaggaatcaaaatatccctcttgttctgttcatcaagcaccaccaacctctctccacgaattccctttgcgaaccgcaaccgaaaatcgctggccaaatcgaacccttttcctaaagactccaatgccaccatctcaacaaccttttccgccgccatcttcacaacgcaaattcagttcagggattccaaaaaagaaaccccagagagagaaagagagagggagaaagagaaaaggtgttggctttggttaaggttaggacggtgccaaccaaccccaattgaaatgggttagctatgtcatgtggggtgtgggccaaaacagaaaagaagttggctttggtggttttgcggaaatgggtattgttagatgtggattgaaggttcggggaagaagatgggatcagtgaacgttacgcagcttttaatgagggaagataaaaaagagtactttggtttggttgtttggaagagaagagaggcaatagctaaaatagctattgctcctatgtaatgcaagtgtaacgggttgaatgtaattgttggagtttgactgtgtcagtgatattattgtgaaaaaggtaattggatggggaaagaataatttttatatctatctgcgtgtgtggatcagtgttagaaaagaatgggcatcgctctgtcaattaagataatcttgtatttaagtatataatttcgggttaaaaaaaaaactgaagattatgatgttttttttttttattattttggccgttactttactctcttctctctcaatggactttacctactacatcagttgctctcccataacaacaagatgctgatgcaacgtaagggaaaaggggcccgtctcacatttttctagtttcttcgtctgtctggtcaaggacaccggacccttttttctgtgccaatccggaaaatgagttttatacaaatctatatgatgttcccaacgcaacagccacgttttcttaactatgatttacattacttatatgtttataactttatcagtactactaatatcttcctcccatcaaatataaatagtatcataaaattaacaaaattaagagagagaaaaatagaagacaagaagaaaaaaaagttacaaattcaatttttcctactaccaaaattgataaaaagaatagtactatctctgatgctaaatactataagaaacaattacgtagtttgtcaagataaataaaagtaatttaattaattaattttatcaagttttaattttatgataaaaataatcatgaaattttataaattagatggttatttttcaaattcaacaaataaatatgttttattttgtgatagcttttataaagagattcgttcatatcattaatagacctaacaaattaggagtaaaaagaaaatttagcaataaaatatatctatatttttataattagaaccaagaaaatatcttttattttttatatatataaccagagataataaatactagtaccatctaaattggaacaattttgcattaattaatttaagcattcaatggtattatataaatttataaatgaaactatagttttcttaaataatattctttcggttccaaaataattatcattttaatttttaatatagtatttgttctggttctttccagaacacaaatgtataacactgaagtgctatggagttgctgtttgatcactctaactctgcagcttcaaggatatcaatggaaggtgataccttggggcaggagatcacagagatacaccaattgacgtggggtgtgtgctctgtgtaattgaaagagagagatagaatgtgtgtgtgtacctttcaccaggaattactgtgtatttataaacagaatacctcgtaacgggcattagaactgcttcctggattcccggcctcatccagcatgttctcaaagttcagtatggaccaagtcagcctccacgttctatgggtaagttatttgcacgattattcataacaattggacccaggcccaaactataacgtctacgtaatctgaacacgacaaccataacagttgccccccaacccggttatcaagtatacttggtagccgggatgcatcaggtgattagctaccttcagggtaaccattaatccgactacaattagtcggcttcttccgggtagaatactattcggataatcctccgtccgcaatactccgagtaacttatccggctacgttcatccggatacaattcttcgatcgttttggagacgtattcccatgactatgctttgttctgtccactcttggaggcatatgactgtccggatagaaaaacatctccgactagacttttatggatacacgtatccggattctgctgaatgtaactgcatttgaccacatcccaataattgtggtcggatttgccctggacgagtaatgtacccagattgtttataacatatttgaaacggctattgaccttcctgattcgaatcagttacttttcctgcccttaatggcaataaatgtctttaaaggatctgtcacttcatttgcctggtaatgattaccattgtcgtaactttactcccttgccctcataattggacgtgcttttaccatgatacccctatgtgtcgtttcattgtggtgactgaaccgtttccctgcgcctggtggttactgcaagttatcatcacatttcaaattttattttcaaaaccccgtaatcgtgcctacttttttccgtgcttgccacttctgcttatttcctcatattacttcctctcttctcttccattaacctttcaagcatcctctcgtattttctgcaagttcccccttcgttcttctcccaatcatcctttaattcctcattaccgcaggtatcttctttctcctttctttctgtatcatttggtgtttttgcattaccgtgactctgtcagcatcaggatttttagggttgcatcatattttctttctgactttttcttggtttatgggttttccttcgcgttttgtaatcatatcattctccttttcttcgattctcctttgattttccttaacttgccctaagaatgacccctgaagaggaggcagagataaggaaaaagtttggccctagggccgcttggttattgtttggccttccattttcggcgggggaaaacgaaagtgacccccttcgccgtcatactggaggttcttcctcctccggaaaacaaaagaccgccgccgaccatggcggtttagcccctttatttcccccgcctcctccgattcctgtaaaccttaaaccaaggacattgggcccatccttaggtccagcctcttctagaactttatcttctttggactcttcgattcttgggcccaaaattgatactggtagtccacgaggtctctctctaggattcttttgccatcaccctatccctccagttggcctttctccatcttatgatgaggaatcatcttcatcctcggttgaagcaatggaggttgattatgatgcctgtatggattgtgtgtccgaggccattcattatgttcaaataggctccgacgatattgctgattcgattcttagttcatgtcgtcataaccctattttgcgtcctgctttcaagggtttgcaaccaggatcgcatactcattctgttgtcgacggggtttcggccttagtgtcttgtgaatttgatgcgttgtctccaggtatgtttactaacttttatttcccctcttcattttcgtaggtataatgggtgttacttcggaaaccgtggacgaatctgcctctgtagaatcctattcagatgtgcccccagcattagcgtctaagttcccttgggtcacttatgaaattcttcgaacttcttctgtcctcgaccttcctagtatagtgtcgacttcagtagggaagcaagatgggttcgcccttcaagctcccctgcccggtgagcccatttgcgctcaacgggagggtaataaccccaacttcttcttcttttttcaagatgtcataacacaaataggtattacctttcctttttcctcttttgaaatcgaagttttaaatcatctacgggtagctccttcccagctccatccaaatagctgggggtttattcgtacttttgaattattttgtacggatttagggatcccctgcaccgttcctctcttcttttattatttctctccacatacccctagaacgggcaaagaaccttctgaccgaaaagggtggatttcctttcgtagtcagagtaaacggaaactcttcgatcccttttcggactccttccgtggcttcaaggacaaatacttcaaagttgccaccgaacctcatcggcgaccctttttcttgtccggtcctgagtcgtccgatgtagaatgggtttttcccttgtactggtcggatgatcattacaagcaggatcattccaactatcgatttatcctagaggatctttccgactcggatgcctcttctgtcttcgtgatttctgagtttataagcgctcatggtcagcctaaaacttccgactacattggcgttggtcgtcgaaatggtctgctttggtgactacattatctcatggtttatcactgcatttgtattaattatgatgttttctgattgtagccggaatgggatcccgacctcctcctaaagccaaggccgacgtcgcccatatttccaaaccaactgaagtgaagggcaaaggcaagaggccgacgaccgacaaacttagcgctccgtccaaaaaacgtggtgcgcctccttacagggcgttttttgacgaaggtgctcaaaaggcggcgtcagctactccggttgctccactgccttcctcctcggcaaccttgaccccggtttcggtggtcgaaactgtggatcttaccgtggcggatggccgcccacgtactacccccgctgctggctccgagcaccttgaggtgcgggttcgtcggataatgtatggaaaaaaggggttactgaagagttggttcgtttgaccaaacccccttcatatatgctcaagccgggtgccccggtggatgaagaactggccgagctggtccggatcgaggagaatgtctttcgctgtgcttctcttgttcgagcacttaccactgttcgggagaagtatgcatcttccttgtgacatttttaactctacttatactttgtatatatttctaagtgttaatgtcgcaggtacgggtttgcggtggcggaaaaggacaaagctttggaggagaaggacaaagcctgtgaggaacttgtttcctttaaggctcaacttgctaccctccaaacgcagtcggcggcggagcttaagcttttgcgggaggaattacttaagtcccaagccgtttctgcctccctgcgggtagatttggcgcggtgtcaaggctcccttgaagctgccgaccagaaggtggccctcctgacttcttcccttgattctgccaaggccgacaaagaagcctgcgtccaggattacgaaggtcggctagctgctatgaaagcaacccttcgtgatgctgccgaggatggcttcaataacgcccttgagcagattactttcttgaacccccgggtagggatgactactgccgggatgcatttcttggcttatgtcgaggacggtcaactgtttcctcctcctgcagctgaagatccttcggtagtggcgtcagaacctttgacaaccgaagaaccaacctccgttgctcctgtcgtcacttctgttgccgaccccacatccattcccgatccatctcagccgactcccgattccgttccttcaaaggattagggaggcggacattattgttttatctttgtatttcttttctttgttgggcctggtgcccggaacaaatatttatttagtgattattcaagttttttacttgattcataaaatatcttgtgcgcgcatcttttggttccaacgaccatttatttattttatttattgcttgtcgtttgtctgaccgtgaacaactacgctaaaggaggcttccattatccggcctgatcggggccgtttagcgtatcattcacagtcatcgtactacaaaaccgcataaaatgattcaatatcgtggtaattcatagtacttgcatttatattcgttgttacaataacaatatgtgtgtccgaatatgatcagactaacacttagaaattacaacgatataatttatttgatacgatgacatgctcagaaggtaggcttccgagttcgtatttattaacaacgtcttcatcgtgaaagaggaccatatgggctcggatatgtgtattccggacccataccctcaataacgaggttgccttcttctactgcctcatgtaccttcgatgaacagggaccatacggactcggatgcaacattttccgaatccatacccctattaaaaggaaggtcgagactttaactgtagtatttcttcaatttgtcggcattccatgttcgcttgactggtttgccttgtagcgtttccaacatatatgcccctttgcctaattttttaatgacccggtatgggccctcccagttggctgctaactttccatcccgagcgtttttatttccgatgtcagcacgtcggagtaccaaatcggtctcttcaaactgtcgcgggaccaccttcttattgtaagcgtgcgccatctgttgtttcatttttaattcccgggcatgggccgttatccggacctcttcaataagttccgactccaatgccaaaacttcgttgtttgcttcctctccgtctcgtagcatttgactccgtcgccatgactgttgtccgacttcgactgggatcatagcttcatttccataagtcatccggaatggagtttccccggttgacgactggacagaggttcggatcccccataagacataatatagttgttccgtccaggtcgacccgacgtcgtacattcgcttccgtaaagcctttaggattgccttgtttgcggcctccgcttgaccgttggattgagggtgttctactgacgcaaaacggtgtcgtatctggaaactagccatcatctcttgaaattgtttgtccgtgaactgagtgccgttgtcagtaactacttctccggggattccaaatcgagagattatattcctctcgaaaaaattttgcactcgggccgaagtgattgtagccaaggggggctgcctcaatccatttggtataataatctatggcgactatcagccacttcatctgtccttccgccggcttgaatggacccaaaaggtccataccccatttataaaacggccatggagccgaaatggattgcaattcttccggcggggataatacccttgaagcgtgcatctgacaattttcacatgaccttacatgcttggcagcatccgtacccatcgtcggccagtaatatccagctcgaagtgctttccttgtcagtgctcttccccccatgtgttgcccgttaataccttcatgtatttcagacaggatatatcctactcgatccggggccacacataccaacaaagggttgtgcagtccttttctgtacagctccccgtcgatgatcgtgaacatggtcgatgttcgtatcaaacgccgagcttctagctcgtcgtctggtaatgtccccttgttgtgtacttacggcaagtgcaccgatcgttaacaagtaataaagtaggtaagtgagttatcgtctccacagggattagggtaatttttacaataatattaattctaaatgattggaaaataaaacagaaaataagagataattgttgaattgatttgttgtttgaatagaaatagaaaataaatgcagtaaaaatataaaagaagttaccaatggaagaaacaattgtggtcaggcacaatcccctttgttcctacctccttcacttgattggtttattatcgtaagtcacacacatgataaatctttcctaaattcgtaaatcctagaactactatagtcataaccagcgatttaaccctttaattcgatcgagaaacctaaacccttagtgaatctgtcaaactaagtattcaaagaatatatctcatgtgatcttgttaagattattcggagaataagcctttcctaagttagttaatccctaattccttagtgaattaaccctttaacccaattcaaaagaccaattccttggtgaattctattaagttaagcatgaaaaagaacatattataaaatccgtagccatgcatccctatgtctaggcgaagaacaactattattctaaacaggtcagaaattagaaccccaacgtgtccattgcgaatcctaaccctcaatacttaaatagaatagccaattccaaataagaataaaacattgaatagcacagagtagaataaaataatcaaaacagcattagaatcaatatcaattcaagttacagaggagttacatcagttcatggccttcccacaatacaagttcagcctgccataggcttcaagaaaccaaaggctgtcaaataatacattcttggtgaccttgccttgattcttgacttccaatggtgaaaatatgagaaagagagagtgatggaaggggttgatagatggtagagagattgtgatttggatgcttcctagaggcctttatttatagataaatctaattagggtaacaaggcctattttcttgttccaaatctgaatcaaatcttcttaattaaggaaactaaatatatttatagaatcctttaattaaggcaactaatcctaatatagtaccaaatctgaaaatatataatttaaataaggaaacaatttcaacctcacgcgacccgcgcgcgatctcgcgctagtcgtgtggaatggccgaaagaatggcgcttgtcgcgtgggacatggcgcttgtcgcgcggcttggcagaagagaatacccttaatccttgaggtactggcgcgactagcgtggaacaccgcgcgagtagcgtggaactccagattttgttttcttcttttgcttgcctttattctcctcttttaagccctgaaatgcataattggtattgacattagataaaatgaaataatattaataaactagctaaaattaatctaaatcctaattatttaatcaaaacataacctaaaactatcctaaaactaagatgtgtttgcaacacatcaaataattcccagatttattagttgctgtcctcagcaacagacagaactctaagataaaaacaaggatcaacaatcaaacctgannnnnnnnnnnnnnnnnnnnnnnnnnnnnnnnnnnnnnnnnnnnnnnnnnnnnnnnnnnnnnnnnnnnnnnnnnnnnnnnnnnnnnnnnnnnnnnnnnnnnnnnnnnnnnnnnnnnnnnnnnnnnnnnnnnnnnnnnnnnnnnnnnnnnnnnnnnnnnnnnnnnnnnnnnnnnnnnnnnnnnnnnnnnnnnnnnnnnnnnnnnnnnnnnnnntattctcaacagatgcaagcataattagatcagaaggtctttgaggcttgtaacttggctgggctaacggtaggaaaatctttggatagtagctaatatgaggctagatccagtcctttaagtccaatcctgtagtcttccattttccttgttcatcttcttcacaatctggtactttattcaacatttattccttataataaataaaacaaaacaaacaataactttctttttgatttttcttttcttttcactatacagcaactttcaaacttttcagcttatagtttcaggcataatatttctgaactggcctgctgcttatttcttctttttccttcataccaattgaattcactttgttttccttgatgccttgatgaacacttccctgttctctgctgtcatgaacttaaattaccttctctagcctcagggaggttggttaatggacatagctctgatttaggtaacagaattgaaaggttaataaagctcaaaattaggtgcaaatggaataataattgaaggtaagtcaatttggccctggttttaagaagaagaaagtgtcttaatcatgtcaatttatacctgcatccagagaaacaattcaagttctagagtactaagaaaatggaatctctcaagaagaaaaataattactgtttggctcaaaagtctcacaggtatttcactcaagtcaatcactattgacttcatttcaagcaacatttcaacttcaacatgcatatcatataccaacaatcaaaatccaatcatgtatcatgcaattcatgctatatttcatttcacacaagcttttatcagagaattcctatccattactgtgttcattcactttttagtctgaaaatttttgatgtgctgcaacttttattgaaataattaactaagaatttaaaataatgactaaaataattaaaacacaaattttctgttgggcatcctttgtgatttaacaaataatgcatatacgaccattcccagatttagaaaattgttgtcctcagcaacaagtgaagtggattaaaacattcaaatcatgtatgcattatttgataaactcaactagcactgagtattagtccaaacataacttatttaaaaccgctaactaacaaaacagttaaactaaaagcatactgaaaattaaaattaaaatagttaaaacaaataagaggttccagtgttgtccttttgctgcagtatgtaacaataattccttactctcttcatcctacagtgcagaaaaattccaatttatacctggtgcagtgggtgaattcccagatttattccattatttgtagctcaaaataaccaccaaatcatgaaactgtgcattagtgaataataatcaaacaaatactagcacagttgttaaaaacaacaattatgtatgtaagtggttgggaatttaaactgctcagaatttcgcagtgctcacaattcccagatttatttcattccatagtttcacataatcagctgtttattattggggttacgatttgtaatggtaataatcagtttataacaaccccaaacaggtctcagacacctgaaattttaacatcaaacacataagccaagctacaaatatcagagaacaatttagcatatagcaaagcttacaaatgtggattcccatatttaaatgcaaacatattataattagaactaggaaccacacgagaattcacatataccatgaatatgcctagcaacaattcccagatttaagtccttgcatgtatcaaaattttcagaatttacttatttcatgcaagcatactccatttgattcaacaacttaagcacctataaaagatgaatctcccattcccagatttgagcttttgatatgttcaaggtatttggttcaaaacattatcaatgcatgccttaatagtatttcatcatcactcaattcatgcttaccctagccattcccatcatgcaattttaattaattgaagctttatgcatatcaaactaaccttgatcttattacaagctaatttttcatataggcattttagcaaacaggtggtatgcattaaaacaaatcaacatagtgtgtgcatttggagtatgtcaaaacccaaaattttatcaaaagaaaacagccaacacacaaccaattgatcatcattcattagtactattcatatttggttctctaccctaaggtttttccagaaatttcattagaattgaatgagaagatgagagtttgatatagtgcagtgcataatcatcccattattgagtttcaaaacatataaggttcagaattcttaccttatttctaacccttatggagttcaagctttgggtcctaagatttggggtgagggtaagtctgagaatgaaattgggagtaggaagaaatgaggtacaaactggagcatttaaaaataaaactaagtctgcgatctcgcgcgggtcgcgccagattccagtgcaagtcctttttggttctgccttaccgcgcgaccggcgcggatttcacgctaatagcgtgggtggacagtatctttggcgcgggtagagcggtgggcggcgcggggtcgcgccagatgccctgcacagtttttcactaagtcctatattttgatttttggattttatggacctactgctatctaatttaacttattctaaagcataaaaatgaaaattaatttatttacttctaaaacaaattaaaaatctaatattaatggaaatacttaattaaatataatgattatatagatagatgcatatgtataataataaagactaggctaacaacttcaaaacttaatcaatagttatgtacattaccaaagcttgtttaacgtcttagctagacgcatcatgctttttaatcattagtggaattaagtggattaggagttttagcattatccacttggttttcaatgtgaggtttcagccggcatttagcaactttaaaaggtttacctctgtctacaggcatgatttctatgaatccaaatgagcaaatcttttgaatgatgaagggaccagaccaacaaaatgatttcttacctggaaatatcatgcgatatgttgctagcattaccttttgtcccggctcaagttgcttctttctagtcttctttttcttggttgtagctttctcaattgcagccaaagaccttttaattgcagattgcaatgttccagctttggttgaacttatttccagcttacctttttgtgctccaattggatgattatcttgctttttaatttgcacatgttctgctggtttttctttatatgtagtgttgcattctgcagcaattcctagtgtttccattgctgtccttgctgcacttactgcagtgttatttactgcaagctctgaggttgatgatatagctgctgctgtccaattttcttcagcaatttctgctgcaccatttgcttcagctgcagtattttctgcatctaaggatgttactacacctgcacaactcatgtcatccagcacatttatcatagaacaattataacttttagatggattagtcttagaattaaaaacattaaaaatcacatattcatcatccaatctcaattctaatttaccttgttctacatcaatcaaagccctagtagttgctaaaaatgatcttcctaaaagtagagggatctcactttcaccctccatatctaaaaccacaaaatctgcagggaagatgaatttatccactttcactaacacgtcttcaattattcctgatggtttccttaatgatctatctgctaattgcaaggaaactccggtggattttaattcagttatgcctaaggacttacacatagataatggcattaaatttatactagcccctaagtcacaaagtgcccttcctatatttatatttcctattgatacaggaatattaaaacttccagggtcttttaatttcttgggaagcttccttaagataatggcactacactcctcagtgagtggtatggttcctccttttactagcttctctttcttagacagaatttctttcatgaattttgcataatgaggcatcttagccaatgcctcagcaaatggaatatttacatgcaactttttaaacatgtctaagaacctggcaaactgctgttgttgaatttgctgtttggttagcaccggatatgggggtttctcaaagcgagagaaatctcattgcttttgttgatgtgcagaatttggctcctcagaattttctgtagctttttcttcatttgtatcagctgctgcagatttttcagcttccttgttgcttgcctcatgctttgttggttcatttagcacttttccacttctagttgtgacagcattgacctgttcccttgggtttgtctctgtggcacttgggaattgtccttgtggcctctctgaaatttgctttgccaattgaccaatttgtatttcaagattcttgatggaggcatcttgatttctgtggtgggctctagtctcttggatgaagtcagatgttgtttgtgacagctgcattactatcttctcaagttcagaaatgctagtgttgggaatgggaggaggttgcaaataattattggacttgtagtccagtcctcctccttgaaagttcctttgataattatttccagcagtataattgtagttcttctgttgtggctgctgctgtctttggtcattccaaatgccattaacctgcacagggtcagctccaacaagaataggacaaacattagaataatgctcaccttggcagtattcacaactgacttgtggtttactggctgaaacttgggctgcagagacttgcattctatctatcttttcatttaatttagccaattgttgggctaaaattttctgttctgcaagcatggcatcactgctgtccaattgtattggttctctctttggcggaatggtgctgcttacgttttcagtgcaagccaaagatttaattagctcataagtttgagctgctgtctttgatctaattgtgcctcccgctgcaacattaacaatcattcgagtttcaggagttataccattaaagaatatccttacctgcttacctacaggcatatcatactgtggacatctccttatcaactcttgaaatctattccatgcagcgcataaggactctcttccgttttgtgtgaagttggtgatttcattcaccaagcggttgtatttttccatggaaaaatattcagcgaagaaccttgtaaccagatcttcccatgttgagatgctatttggtgtttgacagtttagccatctcaatgcatttcccttgacannnnnnnnnnnnnnnnnnnnnnnnnnnnnnnnnnnnnnnnnnnnnnnnnnnnnnnnnnnnnnnnnnnnnnnngggccgatgatttctttcttcttcagccatctctatttctgattccaactctaattcgagaattgaatcaaagtcaaaattctcagcttctcttcttcttctttgtatggctagtcttcttcggatggttctttctatttcgggatcgaactgcaagtccttagaattgactaaacctcgcataaaacttggagaagcaattaataacaaaaattccaatcactaaaattaaaaattactgtaaaaatccgttaaccaatccccggcaacggcgccaaaaacttgttgtgtacttacggcaagtgcaccgatcgttaacaagtaataaagtaggtaagtgagttatcgtctccacagggattggggtaatttttacaataatattaattctaaatgattggaaaataaaacagaaaataagagataattgttgaattgatttgttgtttgaatagaaatagaaaataaatgcagtaaaaatataaaagaagttaccaatggaagaaacaattgtggtcaggtacaatcccctttgttcctacctccttcacttgattggtttattattgtaagtcacacacatgataaatctttcctaaattcgtaaatcctagaactactagagtcataaccagcgatttaaccctttaattcgatcgagaaacctaaacccttagtgaatctgtcaaactaagtattcaaagaatatatctcatgtgatcttgttaagattattcggagaataagcctttcctaagttagttaatccctaattccttagtgaattaaccctttaacccaattcaaaaacccaattccttggtgaattctattaagttaagcatgaaaaagaacatattataaaatctgtagccatgcatccctatgtctaggcgaagaacaactattattctaaacannnnnnnnnngtcagaaattagaaccccaacgtgtccattgcgaatcctaaccctcaatacttaaatagaatagccaattccaaataagaataaaacattgaatagcacagagtagaataaaataatcaaaacagcattagaatcaatatcaattcaagttacagaggagttacatcagttcatggccttcccacaatacaagttcagcctgccataggcttcaagaaaccaaaggctgtcaaataatacattcttggtgaccttgccttgattcttgacttccaatgatgaaaatatgagaaagagagagtgatggaaggggttgatagatggtagagagattgtgatttggatgcttcctagaggcctttatttatagataaatctaattagggtaacaaggcctattttcttgttccaaatctgaatcgaatcttcttaattaaggaaactaaatatatttacagaatcctttaattaaggcaactaatcctaatatagtaccaaatctgaaaatatataatttaaataaggaaacaatttcaacctcacgcgacccgcgcgcgatctcgcgctagtcgcgtggaatggccgaaagaatggcgcttgtcgcgtaggacatggcgcttgtcgcgcggcttggcagaagagaatacccttaatccttgaggtactggcgcgactagcgtggaacaccgcgcgagtggcgtggaactccagattttgttttcttcttttgcttgcctttattctcctcttttaagccctgaaatgcataattggtattgacattagataaaatgaaataatattaataaactagctaaaattaatctaaatcctaattatttaatcaaaacataacctaaaactatcctaaaactaagatgtgtttgcaacacatcaccccttctccaaataacttactattggacgccgccaatcattgtcggtggtgatcatcattatgcacgacggctgtaacgtctgttgctgaattacggttcgattgttcccaggttttttagtgcttgccagttttgacaaaatatcggcccgggcattttcttctctagggatgtgattaaccacaacctcgccgaattcggacatcaattcttttattcggctcaagtattttgccagcaagggccctttcacttgatatcggccttcaatttgagatgcgactaactgcgagtctgtgtagactttcacgttcttagcttcttgctcctttgcctgtacaagcccggcaatcaatgccttgtattcggcttggttatttgacgttggaaaacctaattgcagtgaaatttccgttgccactccttccggattctcaattataattccggctccgctccctttcctgttggaggatccgtccacgtatagggtccaccattctccaattgttgaggcgtggggggtgagttctcggatgaaatctgccaacgcttgagatttaatcgcgtggcgagactcgaatttcaaatcaaatttccgacaactggactgcccaatcggtcaatcttcctgccaaatctggcttatgtaagatttgtcgaattggctggtctgtccgtatgactatggtatggctctgaaaatatggacgcaattttttggcggcgacaatcagggcgaagaccagcttttccaacttttgataccgcgactcggagtcgcgcaatgctcggcttacaaagtataccgacttctgtgtggactccacctctcttattagtactgcacttacggcttcttcgcctactgataagtacatgactaaaatttctcctgcttccggccttgacaatactgggggcgacgccagagatttcttcatgtcagtaaaggcggtctcacattccgagttccattctatgacagcttgtttcttcaacatcttgaagaacgacaatgccttctctgctgactttggcataaagcgcgtgagggcggctattctacccgttagttgttgaacttctttcttgctggtcgggaattgcatatccaggacagcgcggcacttatccggattagcttctattcctctgtgtgttaacatgaaacccaagaactttccggccccgaccccaaaggtacattttaatgggttgagccggatgttaaacttgcgtagtcggccaaaggtttcttcaagatcttcgacatgcttatccacctttgcagttttgactatcatgtcatctatatagacctcaatatttcgtccgagctgtgactcgaatactctattcatcatcctttggtatgtggcccccgcattcttgagcccaaatggcatgacgttatagcaatagttggctttgtcacctatgaacgtcgttttctcctgatcgtccgggtgcattgggtatctgattgtacccggaaaatgcatccatgaacgacaaaattctgtacccggatgaattgtccaccagctggtctatgtttggcataaggtatgcatccttggggcacattttgttcaaatccgtgtaatccgtgcacactctccatttcccattcggcttgcgaaccattacgacattcgacagccaagtggtgtattgaacttcgcgtatgaagccggcctgcagcaactcattaatgtggtcctgcaaagcttaggctctctctggtcccaattttcgtttcttctgttccaccggtttcgaccccgggtacattgccagtctgtggctgcagaattcgggatcgacgcctggtatttctgacgccttccatgcaaatacatcacgatttttctttaaacattggatcaattcctccctctgttcgggttctaatgttccaccaatattagtcacctgaccaacctggtctccaatcagaatctgctcaactttctccactggttccggcctccactcatccgtggcttctcgcatatccaattccaccacatttactgaacgtacacaattatgaatgtcgtcgttagcttctcgttcactttttcgaaccgtattataataacattgtcgagattctttctgatcgccacatatggttaccacctgcctgttgctgcccacaaacttgagtttttggtgctttgtggacattaagatgtcccacttatgtatggttggtcttcccaatatcatattatattgggatggaaaatctgccacgacgaattccacttcctcagacttgtaagcttctctcgttcccaaggttaaccgcaagcgaatagaccccattacattcgtgtttccgccgttgaagccgatcaacatcgttttgcacggtcttaattccttaacgtccaacttcatcttccgaaatgcgttcaatagaattatgtcggcggaacttccattgtctacatacatccttcttacccggcaattgcccaccgtcgctgagatcaccagtccgtcttcatgtctgggtactaccccctccatgtcttgctttgtgaaatacaagagtggaggttctggctctcctgtccgagctttgaatttaggttgtgcctggaccgatagcacttccttcagatattttttcctttgagtggcagtatccccaccaccgcccattcccccggaaatcacgttacattcaaactcgggttctgggaactcgtcattatcttcccgaggtctctttccttcgttgatatgttgattttcgtctcctttccgtttgttctttcttccttgtgtccgaataacatactgctttaatcttccttctcggatgaacttctcaattgcatcccgcagatcccaacattggtctgtggtgtgcccaggtccgttgtggaattcacaaaatcgtgatttatccaatccacccttgttgaaaactgggcggggtcgttcaaccttcttcatctctgtgagtgcgacctccttccagatttgtgaacgggatacgttcaatggagtgtatttctcatatttgttttcgtatcttcctggtcgagatttcggatcattattccgagctcgactctccgggtatcccctattttttgggggtgggcttctcctttcatgacgctcctttcctcgtcccgagttgttgacgacctccatctgttccaactccaagcatttctttgcgcgtgcacgaaattccatcaaagatttcaccgggtctttgtaaatggacttggcaaatcttgacgaaccattaagtccggccgatatcaagtatacgtggactctttcttctagcccatcaacctgcagagcggcttctttgaatctatccaaataactctgcagtgtttccccgggtgcctgtctgattttgtccagggtgaactcggacttcggctgctttttactagtcgcgaagttcaataaaaatttctgaccaaagtcttcgaaattctttattgatctaggcggcagagtatggaaccacgtctgcgccgggcccgtcaatgttgtaacgaaaatccttgatattatggctcctcaatgccccggacacacatctgcagatcgaattcgtcgatatgcacttgtgggtcttgtgttccgtcatactttgataggaatgacccatcaaagtcatccaaatatcgagcgtttacgatgtcgtccacgaatggactgttgttttgctgtcccctgctatatttccgacgatacactggtcctgccttctcgcgaaaattctgttctccagtcgggttcctctcgttgtttgccctaccagtgggattgtcgtcatgttttgctcgaatgtccagattttcgtcgcggctctggtttgtgtcgactccatcgcgtgcctccttctgtgcccggttttgaccccgatgcggctcgtctatcctcctttgatctccggggtcggtatctcttctttgatttaggtgtgtccttagatcttgcggctcctctatccacctttggtcttccgggtcggtacttcttctttggttcaagtgggtcctcaaatcctgcgtctccctctcaggatttgaaagttgtacccgatctgctatcatccgcagttgctgctccaattgtgccgttcgttgcatttcggcacgtctccactcctcattacgttcttctatttggcgtgtaatgccacggatgtcttcctgtctctgtagattttgtcttttctccatgttctcaattcgggttaggattgaattgagaacattgctgacaagctgtccttcgagctccccttcctggcccatccttcgcaccggtggggtcctccgttggtctgtctgagcgggagaggaagcttcgtcggaaacggcttccgtcacatgtacttcttccctccgtgccacattctgattctccggtaggcaaatctctctgttcggcatctctgaatgtggtacggagtggctgtttcttgtgtttaccattattgacaagcgtgggactcgaagtttatcgttccccacagacggcgccaatgttctggttctttccagaacacaaatgtataacaccgaagtgctatggagttgctgtttgatcactctaactctgcagcttcaaggatatcaatggaagttgataccttggggcaggagatcacagagatacaccaattgacgtggggtgtgtgctctgtgtaattgaaagagagagatagaatgtgtgtgtgtacctttcaccaggaattactgtgtatttataaacagaatacctcgtaacgggcattagaactgcttcctggattcccggcctcatccagcacgttctcaaagttcagtatggaccaagtcagcctccacgttctatgggtaagttatttgcacgattattcataacaattgggcccagacccaaactataacgtctacgtaatctgaacacgacaaccataacagtattaattattcttttcatttatacctctaataactatcgttgacttgcatcatttccaacaaagaagattaatagcatgttaatatagtaaaattgtaactctctcatatatttattagttttttttgtgtataaaaaaatttaggacggtaattttaatgggacatagagagtattaattattatatttactaaatacaatatatggtattgaattgaatttaataaatataatgctaatatatatcaagtataaatttttaaatgaaactatatatataaataacattattaaatagtgtaattattacaaaaattaatcttatatctcatacatatatttattaatttttttgtgtgtaaaaaaatttaggacgataattttaatgggacatagggagtattaattattatatttactaaatataatatatggtattgaattgaatttaataaatataatgctaatatacatcaagtataaattttttaaatgaaaccatatatataaataacactattaaatagtgtaattattacaaaatttaattcttatatctcatatataaataataaagtaaacattaaagtaataattttttaatgtgtactttattatatatatatgtatatacttaataaattaatttaaatttcactatatattttagaggatgttgattgagagtgtaaaaatcttaagaaaaatgatatttagtaggaatagtttttgtcaaatatgtaccaaagctgatttctattcaaacctgtttaacaattttgtaaatttttaagtaatatttattttaaaaaatagtgttaagcattaaagttttattcatgtattttgtatgagtaaatatagtcactttagtttctctaagtacttatcgtactgattcgtgaatagtattgctcaaattttaattctaaaacctctaaaataaaataagactagggagtggtaagattagaatttttataattgtcataaacagcttagcttctgatcgattgacattcaagtttcacgcaagtatgatatgcaattcttttactctcctcaatcaatggccgtcattggtgtttgtgagactgtccatacgtcattttcacttgtaaataagaatgtccaaacgaagaaagacgtgtttctttctgaagaaagaattgaccaaggggaaaatggaacgcagaggtatatgttacttctgacaaggtaagtttttgtctactaaatacttttcatacaaatatgatttcgggttaagatgggtttaaaaacatttttctatttaatcccttattatgaagttaagtactaactcttttgcataaaaatttcatcttaatatataagttcagagttgcgcttctccagctccatcacctcctttcttttgttgctccatcaaactataagagacttcaagcctgaacctaaacattatatattgtcaagatattgaatagtcaagaggttggaaacggatcattgtagcttagttttatactcttttgataagttttatatcatgaataccattagttccaacgccaacaaacgcatgcatgcacgtaagtaaaacgacctgaaaaaataatcacaggttgcaacttaatggaatctaaccaaccacatatgactaacaacaaagtcaacatccccaacacatgatgtcctgctgctgcagctgttgttgttctgttctctggtaccgtgtggtttcaccgttttcaattcgcaccagtcaccaggcttccaaactccttgcttaataagtgtttaggagtagggagcaaagtggactttcctaactaagatctaagaattgtaattaaattaagaaattttttataaatgcatgtaggatttaactggtaggaagaaaagaaatacaacggatagaattaataggaaaaacagaaataaagtaaattttaaagttgtttagtttaataaaaataaagaagaaataaaaaagataaaagaaaaagataaaaaaaatttgcttgatatatttcatgattactaatttataccatttctcctcacttctcccagtttcaaagctatttttccttacttcatggatgaaatttttgtacatgagacctacaattctttccttattatttcattggtgccaaaccaggatgagttttaagttttaactatccactctatttccttacttctacattttcatggtatttcaacccaaccaaaaagagtatataggtaaagaaatctcaatcctcatctttttaattagtatattacctataactaaatattacaaattaaaatatataatttagagattaaaattttcattctcttgttctttcaactagacattttgaattttttttaaaaatgcgtattttatacactatctttataattacttaaaaaaatctttacggataaaagttagaaaatttctttcaaacccatccttgctcaattattcattttctcctctggccaaacctaatagtaatagacatttccacacttgaagcagataaagaactgaaaatgtacaagttgcaatagagtagcccgtcctttggaattagtgttcgctcaactttttttttaaacacagtataaggttagaatctaaaactttgtggaagctatccaaattctccattactaggtctcttctaacctgtaacagctagactagattgcgtgtatgtgtggtaagattgattaacaagaatggtgaggaagggaagtgtcatataaagtgccatgaagaactttcattctggtcaagttagaattagcttctaatttatgtgcaattgtaatccatgataaatattaagtcctcaaagtgtagctgaagacacatcacagagaaataaacttcatcagaacaagaacatgaaatgggtcagaatctccaagcttacacacaatagacaaaacgttaatcagaagctccacattaatgtctcagcagctaagcgacgacgtattgatcagctagcatacagattttaagatagaaatacttcacacttaggacccatctggctgtataaaggggttggcgatctcatctgtaccatcagttggggacacaagcatgacagcagttcctctacaaacctgcattgcaataaaataagttcccaggataatgaaatattcattgctaagccaaaatagttcctgttgaaagataatgataaaataattcaaaaaagctagtggatgaagtgcttatagtcatgtgaattatcaactttttcttttcttgcaggaaatgcttttatgtagtgataggttgtagaaattaaaatatactgaatactatcaactgagaaatcagggagcaaagctccgtacaggctacagctgaggaaaaaatgaaaaatcctctggtaatagaatactcaagaaaaggaaagaaatatgactgacactgttgtagtgcaaccaaccctcaaagaccctcaccaacatttatcctctcacctctgtttccccttatttaatactgattcctgaatctcctcactcccacacactcatgccgccagtcaccattcagttataatttcccctctccctctccctctccctcctctctctctctctctctcctaactgaaatttcccctttcggttattattcttgttcctctcataaaccagcaggcctttgctaccattgggcaaatcatattttcctatgctcttgtacatgtgttaagggcctatcataagtacatttactagaggcactgcatattttaaattctataaaatttaaacaatcagcatacacatctataaaccaaaacaaaaaaactgataatagagttaaagtacaacttttcaccctcgatgaacaatttaacatggccagaatcagtcaattgctttattatataagaattcttaatagaaaattacagaaacatattttaaattccttttcttgtagctctcctaatgcacttagatgacatgttcttaatgttttttagaaggagatgacatgttcttaatgttttgcaagagtatataattgatctctcctatgtacttggactgtaattctaattaattaacttgatatttttcttacaaatacaaaataaatattaagcttggtggagggttaaatccattagtagttctatgttccagtcatttccttgtttagttcttttcctcttcttttctcctttcaccattcttttattttaactttgtttctctcttttgtcctattttcgatttatcattaggttcatctaccaccaaccccaattaacttgggttaaaggtgttgttgatgttgatgttgttgatttattaaacttccctagtatccaaagaagcaaagatgcaaaatttcaatgaagcacgacatcagcaaagcaagctttttatgagccagaaggtgcaattatgacactcatatgatgttgaagaggaggaaaaaccctgacacagtgataaagttgtgccttggtgacttgtcggtcatgggtttgaatccggaaatagcctctttgcatatgcaagggtaaggcggcgtacaatattcctcccccttactttcgcatagcgatgagcctctggacaatgggatatgtagtttttctgaaagcgagtcctgacacagcggtaaagttgtgtcttggtgacttattggtcatgggttcgaatacggaaacagtctctttgcatatgcaagggtaaggttgcgtacaatatctctccctcttaccttcgcatagcgaggaacctctgagcaatgaggtacgtaattatttttagtttttatatgatgttgaagaggagagcttacaattaagccaagattcctggtctgatcggtagttttgaggggatcatcaggatctgcagcacaagggacaaataaaatcttctttcaaacaacagaaatgaaatattagataatttttaagaataagctaatatgttaaattttgttggtggagtttataaacaagcataatgctgatagtaagtagagtcacacaaacatttgaactatgaaattaaatccgttcttttgacacatagaaggtacaataatatgcatagttgtattgacatgccaagttcatctaagagtgttcaataattcggttctgcactatactgaacaaattctgaatggaaattccattttgaattcggtgctgaaacaaaaataagtaaaatgatgctgaattcattcagaaaattaagaaaatgagtaaatcaagggcttaatcaaagtgagaaaaaaatttaaatatcataggatcttccactccaatgcttatgttatttggaactaaaagttcagtgctaaatctgcacttggggcatattagggtaaacaacttgattaagcatttattcactaaactcttataaaatgagaattcccatataggcttggttacagagcttaatgaaataagctaaaaagtgcttattttgataaggatcatagttaagcttattgaataaactacaaatacaaaaaacatatagatagataaataagctactttcataagcttaaacaagcccttcagaacgctcccttaattatagaagcagtggaaatgatgataaaaatggcattatttagctccttagttgttattcattcaatatttcactctcagtcggtataagtccctttatgtagttttcactaatttgctaaatacccaaatagtgatttaattctgtaaagttaaagtataatcaagcagcttcatggcgtaaatcatcacaccaaaaaaacttcacccataatgagcaaataatccaaggaatcaaccaaaagtatagatgaaaactcaaatattttgccccctagccctgaaagaaattttttgcattttagcagattgtagcaaaattcgctgaaaaggctggaaaagcagtatcatgaagtcacgaacataataagaaagtaacaaatagagctactgcagtacatataccattaaaatgataaacagaaaaactagatctctgcgttgtttagttacctcttaaaaactctacagcttcatctaggacaaggttaagcaactgatcataccctttcagagtccctgtcactgcaatcaaacaaaacaaaacataacaaaaaatatacatgtagaagagtttatttgcattttaattatgaaagctaactctcaattgagttcttgcaattcaaaacgaaacgaatttcatacttccgccatcattttaaaaaatcaatacataaatcattaaccattttaaaaaataaaaaatcacaagagaagggaattgggtaacctaaccttgtctgcctccagtaagcttaacttgaacgcctttgtctacaaactttgcaaggtccaaaaccgtttcttttctgcccgactgtgtcaattataaaatgcacaaaaaaaaaaaaagatttacatatcataaagagcattcagaacaaaacgtaaatgaaaaagggaggaaaaccctaaaagaagacagagagatgaaatagttttgaaaattgaagatgtgattgggttttgctgaatcttaccatgcttaattcacgtagtgtcgggcttcgtttggtgctgatttgtgtctgtgcgacaatgaaaagagaagtaccgaagcgaaagtgatagtatggatttgaatatacagagacagaacttggaagagaggagtgaacaacggcaaaatggggaaccaatatatattattagagaaaagtgacggcggaaataactttgaaacaaaacagaatataaatgtttttttttacagaagaatataaatgtatttaaaaaatatactatattagaaaacttttaaaatttcaaaatgttaattactttaaattaaaattttaatggaaataaattttaaccctctttttttaggaaagcaaattttaaccttctctttatttcatgaaaaaaaaaatgaaaggaaataaataaaagttcatttattacacgtcattaatggacaaaaaaaatttaaaataaaaattttaatatatcataaatttaatataaaaagtttaaggatctaaaacaaaaatcaatttgttttaataatcacaaacaaaagagataataagacacaccaacacataaaaaaacttatctttatattcaaataacttctttgcttatgttatacctagagagaattaagaaattactccattattctctaaattaatgatacacttcattgtgagaatgaaaatcatattaagaaatttaattgtatccaaaaagggatttattataatacccttttgcattaaatctttgtaaggatgataaccagtatgagattatagtatgataaatgttaatgtttttctctaatactttttttctaagactttctatgttttgcnnnnnnnnnnnnnnnnnnnnnnnnnnnnnnnnnnnnnnnnnnnnnnnnnnnnnnnnnnnnnnnnnnnnnnnnnnnnnnnnnnnnnnnnnnnnnnnnnnnnnnnnnnnnnnnnnnnnnnnnnnnnnnnnnnattaatttttgtcacggttaaaaaacattatcaagtcaataaaaaaatacattagtaacataattaattaaaattattacaactgaattaaaaatttattcttaagtcatcttaacataaccacacattaatcacataatcatttagtacaatcattcttaaatgtattttttaaatggttaaagtttataactatttatataataaaatttaataatttaaaaaacaatttgtaacgactaaaaataaaataaatataaggacaataaaatactatctgaaatgttataaggatgaaaaataaaataaatataatttataataacaaaaaaccaaaaaagttaaattgtaagaaattaaaaatatatttaaacatattaaatccaatttgcttattaatttttttaaaacacttattttaagtttaaaattgacccaaatataatatggataaataattaataaatgtttgtttatgggtcaattttttacttttggaaatatagaaggggaaaaattatcttgtatttgttatgaagtaataacacaattaatcttgaatatattttatattttggtagaaaatatatcaaaatataaatgatacatggattaatgttcaaaaaaggtggtaacattgatgaacatgtaaattatagaattagagcatgatggatgaaatggtggaatgcatcggagtttttgtatgactgcaaaattctccttaagctgaaaggaaaattctataaaacaattgtaagatcggcaatgttgtatggagcataatgccggtcaacacataggcaacatgagcaaaaaatagggatagcaaaaatgaggatgttaaggtggatgtgtggatatatgaaggtggataaaataagaaatgagaatattcgaaaaaaggtatcagtggtactggtatgtgaaaagatgagagaacatatattgaagtggtttgagtacgttatgagaccggcaatgctgtatggagcataatgctgaccaacacataggcaacatgaacaaaaatagggatagcaaaaatgaggatgttaaggtggatgtgtggatatatgaagatggataaaataataaatgaaaatattcaaaaaaatgtatcagtgtaccgatatgtgaaaagatgagagaacatatattgaagtggtttgagtacgttatgagactggcactgaatgctcccgtaagaacaaaagtttgttaccaagagtttgatacaaagaaaggtagagatcaaccgaaacttacctaaggaaaggtagttaaataaaacctaatagagtgagatatagattggtggacggtatgtcttaggacggagtgaaaaaaaattataagtttagtagagggttaaaccattagtagttttatattccagttattcccttattttagttattttccttctttttttcacctcttttttctcttttttcttattttaactttttttcccctctctctttctctttttgtctcttttattatttattattgggttcatctatcaccgatctcaattaacttagatttaaggtgttgttgatgttgatattttatattttgataaacaataatctcacttttaattaatatttaattccaacgaaaggaataaatattatttttcttattatccacaatccaactattctcttaatgctacattcatgtatatatgtgcttcaatttcatttatattattcacaataatttttaaaaaggtattctaaatttttatattattaacactgtaacctctgaattggctattttcttgaagttacttttggttttttggttgactatttgatttgcatcaagtatacatgtagttttgcggcaacaataagactggagttttaaagcatgaggcagcaaattaaagggaccatgatgagttttggtgatgttttttttggcataatttgtattatgataagagtaactatattttaagaattaactacgttttttatttttaaatttttatttgatttggttaaggttctttaatcttttttattaagattttaatctctaaaatttagtttgattggtgaagatttttcaacttttttctattttttttagtcccataacttttaaaaattcagtctttactccttaaaatcccaataaataaataaaaataatgaatttaaacttttgttgagaaactataaactgaaatttctaaaattttagagatcttaactagtcaaacaaaagtttagaaagtaaaaatctttattttttttttgtgtttgtctaaactacttcttcttaaaaaaataatttttctacttattttaaaaaataaatctaatttgtttattgaaaaatatttattaaaatacttatttaaacttaaaactggcccaaatataatatggataagcacttagggtatgtttgtttcatggctaaattttttagtcgtgagaatattggagtggaaaaaattatctcccctttgttacgaaataataaaataattaatcttagatatattttaggttaaattaacctataagtcgctatatttttaccaattttttaattaggttcctaatttttttcttttaattgggttattagtttttcaattggatccctcatttcactgttgttatgaaaaattaaccgcaaagactcaattagaactccagacaggaaaacaattcttcttgggtgtgttatattcacaattgagtctatgagacttttttgcaaagtttctatcttttaatgtcaattcaacctagatatttctttatatttatttggttttgcaaaaggttgaaactttataaaaaaaactcacacaattgacttaattgtacttacaacacattctaaaagcattagtccactatcagtacctataattaagtatttgtggttagtttttcataacgataattagatgaaacaattcaattgaaaaataaataaaagtttagggatccagttgaaaaaaaatgttgaaggaccaaattaaaagaaatataagttgagggacctaattaaaaattttgtataagtataaggtaccacaaagtaattaaacctatattttgtatatgagtaaataaaaatctcacattccatcaatatttaatcctaatgataaaaaatatttattcccataaaacataaatccccattagtgaataaaaatatacatatattctccttagtatccactactcaactccatttatatatgtgttttaatttttctgatttccacccattttttcctgtgtcaatttcatgtgtgttattcacaataatttttaaaaaggtattctaaatttttatattattnaaaaataaataaaagtttagggatccagttgaaaaaaaaatgttgaaggaccaaattaaaagaaaaataagttgagggacctaattaaaaattttgtataaggtaccacaaagtaattaaacctatattttgtatatgggtaaataataatctcacattccatcaatatttaatcctaatgataaaaaatatttattcccataaaacataaaatccccattagtgaataaaaatatacatatattctctttagtatccactactcaactccatttatatatgtgttttaatttttctcattttcacccattttttcctgtgtcaatttcatgcgtgttattcacaataatttttaaaaaggtattctaactttttatattattaacaccgtaactctaaattgactattctcttgaagttacgttttttttttttactatttgatttgcatcaagtgtacatgtacttttgtggcaacaacgaggctggagttttaaagcgtgaggatgcaaattaaagggaccgtgatgagttgtagtgacgtttttttggcattatttgttggaactttcctgtgcgttgtttatatttatacctatttggacacaattatatattttttaaacaaactttaacacaataaagatatttttagtaattattatacattcctaggataagaaaatgttaaacaaacacatgttttaattattcctatacgtataaaaatattttcaacccatttttaatcactaaaaaataatttcttataagttagttttataaaattgaatatgactcaaacttgcattataacaatatagttttttcataccatattaaaataaaataatatatttattaatattttaaatgttaaaatgttaatatacataaaaagtcattcgtatagatttattgaaagataattttgtatcttattttcatatcttattgtaaatagaaatttaaataagttttatgaaggttgtatcaaaccttcaatataaatttatatgaatgaaaatgacaaaattttgtgaaattatataaattcttactgttttttcaatcactataataattctcttaatnatatattaactaacctcttctaattgtttaaaaaatagggaagaatgatgtatatgttttaaaaaaagaatttgaataattttacaaaaactcaaaagtaattagtataatttaatcataaatatatttgaagaaggttaattgaatataaactttcgtgaacaaaatttaaaaaattatatgctcatatatttaaacaattcaatttcaatgtttaaaactatttttttttcatactttaatttttactttcatctttatatttctctttttctctctttttttttttagagattttnnnnnnnnnnnnnnnnnnnnnnnnnnnnnnnnnnnnnnnnnnnnnnnnnnnnnnnnnnnnnnnnnnnnnnnnnnnnnnnnnnnnnnnnnnnnnnnnnnnnnnnnnnnnnnnnnnnnnnnnnnnnnnnnnnnnnnnnnnnnnnnnnnnnnnnnnnnnnnnnnnnnnnnnnnnnnnnnnnnnnnnnnnnnnnnnnnnnnnnnnnnnnnnnnnnnnnnnnnnnnnnnnnnnnnnnnttttctcttctttttggtcacatttttctttttctctttctcgtatatacttttaaggaatctaagagaccatttttccttattaaaccgagccttgatagcacttcaggattttgatttattttatttcatggtaaaagcataatacaagtccaaaaatccccactgcaatgaactcagatagctaaatagacacacttcgaatcttattgccacattatagttttttgtcagagtttctgatagaaggacatgacaatacttaaatttattcttagatggatataactcataactagtctcggccatcattaaacaaacacttaattggctattcaattccatcataattctgacaatttttttttttaacggttaaacctttaactttagaagtggtgggggcttcctgatcaaagtagcttgctcaaaggaataagcaatttcgatgagctttggttctgagcctttcaaacctccaaagataattccaaatggcgcacccttttcatatcccgctggaacagttattccaggataacctccccttgcaagtatactaacaaagaatgaaaagggtactaccaccgcgtcaagtttatttgttatcattaatttctcaaatccaatatgtgacaatcttgccatgtttaacactgcttccttcagttccctaactccatttgtcttttgagctatcaacatgagatcttggccatactccttaagtttctcctgcaatttccataccaatgttattatatctattccagtgaaattgttggaaatcgacaatcacacacaaatctaaaaaacagaaaagagaatagggaagagaaatatgacacagtattttaccctggtttatccaatgtaggctacgtccagtttgtctgtattataatctcctcaccgtcactcgttacaagtcactcagtttacaaggggaatataaataggattaaaagaccagttggctttctgctgaccccgccaacaagaagggttgtcatctgactgcgaaagatgagccatatccaacagaaatgagatttaagtgatcaattttcagttaaaattagtcttagtctgataaaattcggataatagtagagaacgtgttaaaaagaacataatgttggtatttctatttgataattgatgaatttcgccttcctttatagaatttaatatatttgaatgatggacgaaattcatcaacaagatgtattttgagcaaatttttttaccatatctattttaatcatcaacaagtaaataggaggggctttgttacatactaaccaattttgggtgtttcttgttgaaggctatcacatcggccaagcttctcactggggaagtaactaagtctctgaggtatgcgttcaaggataatttgaattcatatgccagagcaatgccttcactttgatcattaaagatttcctgaatgttgtttatctccaaattgtcaaccaacactgctcctttttgcctgagtttgaaaaatataagtatgatactgaataatgcaatcaataattaatacttgacacaaatagtaattttcattaccttaatgttttcaggtgcagttcgaaagtatcatgcataaaagtgtcatttccaaaaccgtagaatattcttacgacacctaatctctttcctctcagtccatctttctttagaaattgagcatagccacctcttgggagatactttgatgctttgattgttgccttatcattgatgtcgattcctgcaatggtttcaagaacaagagcagcatctgatacagtcctgcaaatcggtctgtaccagcccacaagaagtcacacatttaatgcaacaaaatgtattttgacgggaaaagtaataatgcttgcaaagtgcatatagttttgatataaagaaatagcaaattacattaatacttcttaagaatttttcgaattacacaaaatactattctttgtttaatgtttataacaactttcattataggagtgttgttttcaaatttaaatcattaagggagttggtgtaatatataaggagaatatgagtataatgcttttaaacattaaaggagttagtttaataagagaaaaaaaaatgatattgtatgtatttcggaaaaagctcaaaagattccagtgtaatttgttcaaaagaaaatggtgaaattaccatagtccatagacttacccaactgtgtcctgtaatggggagattggaactacccctgctctactagtgaggccaactgttggtttaatgcccactactgaattagaacctgaagggcataaaatagacccatcagtctcactaccaagtgacactgccaccaaatttgcggccactgatattgctgatccgctactagatccacagggatcacccattgtgtatggattctgcacaacacaaataataatataatagattactttactatggacttttgcaaatcatcaagaatagacagatagatttgagttgaaaagcaagaacaaggtcagattaaagtcagaaaaagcaagtaaatcaatcacctttccttgtccacctctgccattccaaccactgggtgcatcattcgacctataatgtgaccattcactcagggtggccttgcctaaaatgatagccccagcttctcttaacctggtaactacacctgcatctctaggcaccacagagccaagaagtgcaaaagagcctgcggtggtgttcatcttatccttggttgcaataatgtccttaaccaaaatgggtattccatgcagtgctggaagagtccctggtgcattagcctttctctcatggtcagctttgtcagcttgttctagtgcatctgggtttaactccaacacccctctcagaactgggttttgggtttgtatttgtttgtggtagaactcaacgagttgcctagaggttaattggtttctacggaaagcaagttggagatcatatacagttgcctcttcaattgagaatcccaaagtgactagagggattaaaagaatgagttggaaaaacaaagagaaacatcctactgtgttgcacgccatgaaagcaccaagatataatatttagttaactgcatttttctgtatctatatgtgcttcttaatcattatggccgtgaaaaataaaatatctagaaatactccaacgtgattcacaggctgtccacagtatctgaataaataattgagtaggggcagtgacacatttttattcctgtcatatcgctttgttcgatgattctctttttctctctctccttttataagatttattcgataattttgaagtgaataaaaattgaggagatttctcaatttcaaaatgtgacgaggaagttttgtggactcaagtgtgaaagaaaatgatgatattgtgaagataattattacaggtgagaaaagtattcagcatcatgggaataatgataatcattgtggataaatttcttgtctcaagcaagaaatgtgacgtgtaactaaataaatataggtaaatattaacaaatgtttttagagtattgattaaaaaattaaaagaaaaaaaatatttgaatgtgtgaaattgtgtttttcataatttttttatattttacataatgaatatttttaaaaatttcttaatcaatattttaaagatactcgtaagtataaacccataaatatatgattaaaaagaattgtataatgaaagactaggggaaaaaaagaacctgaaaatcaaaataaaggataaaaacttcgggagttcgtacggtttaagactaatataaactaaactaagagttccattatggttaactgtgaataaaatgttcttaatcaaaagcacaaagtatgctaatagtaaatcaaacaactaaacaataataaaccttcactcttctcttctctctccttaaagctgctgcatagttacttgattaacccttcctcatatgccttaatttgaccttctcaactcgataaatgagacacatagttggcttacaatatttgagtctttctccttttagaaaaggaaaccgcacccaacaagaaagctatgatgaagagcatgggaaactcaggaaattttggagggagacgttcactcacatatctttggaattccacttataaagttggtgtacgtggtccaaccaatggctacacagggtctgtaacatcactctattagtaactccctgcatattccactgttgattcttaaaaataagagagttcttggcatactagagagaagccaccgtaataccaaacattaatctccatctgtgaagcccctttgccgtgttccccaacaaccagtcgacaagagacatagagaagaagctgtgcatagaagggaaaaaaatccctgccaagctcttcccaaataggtttgacatcagaacaatctctcagaatgtgcaattcagtctcaacaatagatttgcataaagggcacagaggatcatcaatataccacaatgttgccttctgacattagtctttaaggcctttattagcaatcaaccaaatgagagtccaaattctatgaggatctttccactgccaaatcgtctgcaacctgttagagccatgaatactgtgataattggttgagattgaataagttgatttcacagtaaaacttccattagtagtagctcccccaaaccttccatgagcagggagaggggtaggataagcaagaatctcctggataggccagtaaggaaggaagtcctacaactccaaaactttccacccaccagagctattaacatactcgatggaaaccaattgtctagccagaaattgacccgggaaccattacccacaatccacgtaatagctttccaagtttaggaatcatgcatcccacaattaacaaccgagataatggttgatcagcacttatatttggcccttaatacctacacccacaactcctccggctgggcaataagctcccaagccatcttcatgataaaagtcttattgtaaagatgcaacttcttgaaccccataccaccgtccacctcccatgtagtggtatgccaaccacgagcatctccatcattccaaaagtaactattgaggtgtgaatagtaaagctcatactccggacctgccgaggcccaacaatgttagtgctgggctcatttcacttgtcagcaacgggtaaaactaattacattaggaaatataatggtatgggaagtgcagtaaggaacactgggaatgcaggaagcaacaaccgtcagtaacatatggccttcttgttcaaaccttggcaaatgagattgagaatgagaactagattggattggtgatggtgatggtaatggtgatgggtactaattggtgattggggagaacaagggtttgttattgttaccacagtgagcagcaagagggtccaagacagaaggagcaagaagaagagggttcaagacctcgaagtcacaaccgagaaatggtaaatagcctccaaaatcatctacctaatggagcttctcaagcaagatcccgaaatggtgattcccgttcgctccctcgaccaccaccgccgccagatcaacctccccaagccccatcatgtctccgatttcctccgcaaaactcccaacctcttcgaactctacaaggaccagaagggggtgctctggtgcggcatgaccccaaaagccgagaacttgatggaacaacaaagggtcatcgaagaacacgccgacaaagccgccgaacacgtcacgaggtttctcatgatgtcgctggacaaaaggcttcccttggagaagattgcgcatttcagaagagattttgggttgccgtggattatagagtccattgggcgcataagtatcctcagctttttaaggggttgagtttttggagcttgtatcttggaaccctgattgggcaatcactgagttagagaaaaaggtggtgacagaaacaactgaaactaccgaaagtgaaactaccaataccccaggaatgctttcaattccatttcctttgaagttccctgcgaactcttagagggtgtatcgttactatggtgaaaagattcagaattttcaggagatgtcttatttgtctccctatgctgatgctcgtggacttaaggctggatcattggagtttgatataaaagggctgttgctgttatgcatgaactgcttagtttcactattgagaagaggttggtcaccgatcacctcagacactttcgttgggagcttgtgatgcctcagaagccgatgaggcttctgctcaagcactgtgggatcttctatgtgtccgagagggggaagaggttatgactgaggcttatgagggttctgagctcattgagaaatgccccttgctgctgtggaaggagaaggttttggggcttgtgggttatagagggaggaagaagagaagcttgaggtatgcagtgatgatgagtctgatgtggaggatcatgatggtttggttttggatcagagggattctgaagtgggggacttgcatgtgcagattgagcctcggggtactttggattacgaggatcttttagttggggatgattctgagatggatgatggagagatttcatgaagatctggaaattttgaaagttgtcaaggtcggagttgtatttcagttttaccatatatatggttgattcactttatacttcaaagttctcgggaacacgcaattgtataacttaatgtaaatcaaattttgaggattggcattttactttcatagattagcaaatctcggttgcgttttaaatgtggggaaatgtggtttcttgacaaatgaaaggttaaaagaaaatgaattaacaataaaatcataataaaattgagctacaatgagtcaaaacaaatgttcgtaaacataaccaagatatatcgtgggcgttagctcaaattattgaaatttctgacaatatttgacatttctactaaaattgttatcatcttagttcatttgtgtacctctttataacccgaagtcctaaatggtattgatacctcacatagttcattttagaacccaagctcttaaaatgattcgttaatgtcaacaacccaaagtctgaaggatattgattccccgcaacagataaatgcaaaagttccccggtaggctaaatcaaaataggctttgatgtaaagaagagacaattgtgacgcaaatcatcatatgaacacctagtggaataaggcttttcttcttgaacaaatcatatgaacaatgaacacaaactggaagattaatctatatgttgcatgtgtcataagaagagaaccatgattggtctgccaaatttgcaagttcactatcctcttcgttacaaaataactcaaattgaccattaacattgttcggcaccttggtgtcatcacaagtaggcatgacaaggtcatccaaagtaggtcgtatttcttcattaggcaaatgtgttttggcaagtagcttattaagtgtgctaatctccttgtcatatttcttcttcaatttatcaatttgtttgtaggcctttgcagcttcatgctctgcatccatggcccgcttctgcaagttaatacatcttatagaattagctcaagtagaactgagctgacccagctctttcaaaaacatctccactaccaggttaaactatatgtatgcatcagctgtagcaaaataaaattgacctgcttctcttacataaaatttgctagaaattcatttgtgagagtgaaagacttcagcataaaagaataaaggtttattcatttggtccctatagttgtacaaactttaccttttaatctctatacttaaaaatcatctcttttagtccttatagataccttttaatctcttctagttcctatggagtttagatgatagagactaaaagagattaaaaatgttatgtatagggactaaaaggattaaaatggtatgtgtaaatacacatttgaatatacatactttttttaatctgttttagtccttatgagtttagacgatagagactcaaagagattaaaaatgttatgtatagggattaaaatggtatgtgtaaatacacattgattcttgctcagttgaaatttgaatatacacattgattctttatatacctgtgcggtaatgacaccttcttctgcttcattaagtcgcacaagaagttcacctgcagcttgcactgcttcagcagtatccttcagttgagctcgaagtcctctattttcatctcttaggatttccaattctttttctttttctgcttttaatgctgaaatttctgcagcaagggcatttatgaatttagagtctgcacctcttactcctcctctggaagctgcttccttgacatcatcaatgctatcctggatctttctatgcctttcaagcaattggatatgtttctcttctaaatcagcatactgttctaaaattcgtgcatggccttctatagccatttgcattgtttcattcagttcctcagcacacttcctctcagtatctagttcctgcttcctcttttcagctagtgacctgctagcttcaagttcagctctcagtttttcagttagagaaatccacctgctttctgcctcagtccattgacttttttcctgttcaagttttactttggcactgtcttcagttgattctggatttgcatttgccttagtgctagcctctgttaaatcaggaatggcagttaggtttgctgccaaactaggttcagatgaataagtcaattgcaatggagtatattgctttattgcggatgtggatgaagagtcaacataaaagtgaagctgatttcttaaactacatatctcttccatcaacacttccctctccccaaattggtaaaaattctgatactcttgtaactcatcttgtactctttttaactctatcttcatcttcagaacttctaaatgatgctcatggttctcctttaaatgctgttgaattttgatagcaggcaagtcctaaatataagcatcaaagatagtaatcataaaaataaaaccttaaaataatttatttctaccttgttttcatgtgtgagggacaccagctcttcatccatgaactccttggtggataaaacaccatcaataaggctctgaaggtgtaggattttatcttctcttgtatgtgttattgtggcattgcattccctctcttgcctgtacttttgcaactacaaatatgattgaaaatagtcacaatacaagacaaaacaatgaccacagatgattgtcagtaaacagaatcttaccaagcaattgagctgcattatatgagaagtctgcttcgcacagaactcttctaatgccatttctctccttattgatcctgccaaaaccttctctactgcctacattataatagaaagaaatgaaaagtaatagattgaatttaagctataccagaaaatgaagctgagatccttgcacttactttcagaatttgcttctttggtttatcagttgactccgggcaatcaatgggtaccagctgcacatttgagctattgtcaatctcattgacatcaagctgcattcggcttttacagttattacaggtaagcatagcataatcttccttttcggcattatcatcaagaatagtctggactccgacatcaactttttccacaggaataatgagcctggaatctttgggtctcaatgagagactcgataacgatgcaccatgatggtggctatcaataatttcaagaccatggtggatgcttactgctaaattttcagttttagttaggaaatttggagctgtctggctggagagagcagtagacaagcatttctggttaacggtgtttgtgcctaaatcactttcaccatgaaaattattctcagaaggagactgctttaatgaggtcctcaaacttttcctgctgctgctgattgttggtgaaaggctgggaggagggggtttgaggatgggggatgttttgcatttaaccatgccgccagcagggctgtcaccattcattgcagcactaggagaaccaatagatccagtaggggctgaaaaaccagcaaaacctccatttgagttgtggagaactacagcatgatcctcaacaccttcctcatcaatctccatctcctcatcaccatcctcatcaacatgaggtagtgataatgggtgattgagggtaggcttcagcaaattcaaacttcttctgatcaacgctgctgaatgacctcgacttccatcacttggactgtaaccatttgctttaattcgatgaagttcatcctgtttgattgcttacagttataagttatttgaaaaaaaaatgtactggccaggtataaagaaatgattgatcatggtcgaagagatattaccctgagttggcatatcacgtctcgtaattgattcacatcaccgtgcattacttcattgacaactgctttattcttgatagcctttacacattgtgcaaatctcaatgtactaaaagtttctctcttacaactgcaatgttaagccatgagaaataatccagcatacattaagagccagaagttcaaatcactaatggttgatatctacctttgtgctggggaaatagcacaaaccaaagctaattttgcatttccgccaagagactcctgcaataaaaatgtcaacctggagtctctatatggtatatgtcgcagctttcctgtctgagaaacttcagctagaatttttatcaaattcctgcagtacaattcaacctcagtaagtaattggatcatggatgattagaatttggcagtcaggaattttcagaccatggaataaatgccacctaacaacttccctttttccctttccttcacatctaggttttatgcccatttcatatttcatctatcatgggggaatgactagtatctattcaccagcttgagggggaatgttgaatgggaatcacaaatctatgggagattgtttggattgaagatgcaaagagagagaattttttagaacgagtaaacttcagtaatattttattctgatttaaaatggctagattacaggtacttatatgattacaatgcaattgcaactaatgtgatagcgaacattcatttaccgaatccaaaccgctgcgcgtagcttccagctgggttaactacctaaaggaaaactggtccctgtccattcccaatgagctagattgacctaacacactgtatcccaccaactaacatcccccccccccctctctctctctcctaagctcaaggttacattacataaacttgtcaaacactctgatcttgcctctgaaaacatgaaaatgcagtgaagagagaggcacgttgaaagcatccacccccanctgatcttgcctctgaaaacatgaaaatgcagtgaagagagaggcacgttgaaagcatccacccccagtaatcatgagttgggacatgatggagtagtaggctcttgcttagaacctttcccaaacaaaaaaggtatctaactccatttgtttaatgcaagagtgaagcagcagattgtgagagaaccactgaactcaaattgtcacaggatttttaggagtctgaaaaatgcaatgcaatttggtgagcaatgaccgaatccatagaatctcagctgaagtttgggccaagcttctataatcagctttggaatttgccaccaaatttttcttctttgatcaccacaaaatgggccatgtttggataaaattctccataggtatttataggaaaaaaataagaaagtaaaatgcattgagcttctttataagctaaaatcaacttgtatttgtatttaagctatttttcgtttgtgattgctagtaatttgtatttcaattccaatatcaaacatcaatgtatacacacattttaaaccatacccaagctgtgaaagggatctattaatattgccagcttcctttaaacggtctcctgctgcacccgttaatttttgtcgttctgacccagctagatcaacaagatttattttacttgttctaaatctgcttacaccatctgcagtactctgcaaagtgaaaatatggactcgcttcaatacctcttttctctttttacaattctattgtgaagctgaaaaatatcttgccaacagaagttcttttgaaaaacagaagaactgaaaagcaaaagttcattgctaggttccacatttcaatattgcatatgtagtttctcctaaaatttatctagttaaagattgtaaaatgtctgcccttcctatctaatattattaaaaactatctccaagccacaagagaagagtgcatcaccttgcatcgagattcaaccacacaagtaaaaacagtatgagaacgtgaactttcagaatttatactggttgcaccaattcttctgtttaacaaaccctgtataatgaaaggtatataatagtaaaaacacaagagaaaaggacaaaggaaaaccatggcaattatgaaatttggagatctttagaatgtgttaggctcttgagatctttagaaacaaaattataaagaatggagatagagaataggaaacaaaatatagctcttctgtattgaaaaattgaaatcaggggatgactctcctcaaaggaaatcctcttcctccacagagcaacactgcctcaggtgcaactcgacaaatatataatttatttctcaattacagctctctgtttatttcttctaactgactaacagaccaaataatacccactaactacctactcttcttcgtctagaatagatagttacattgggctgtattcatttacagaagagatggccctaacagaatggaaaggaaaaacttgataattacaagcatataagaatggtcaattgtctaaaaaacgaaaagagagagagctattcaagtcagactgagagaaattcagcatttcatttctcctactactgattaaatcaactggttctaccttaatggaaatttttgtttttatgtaatgagtcatatatgctcaaaatgaagctctgccacatttgttacaaaaatacttgttaaaaaaagtaatgaagtactcattcagtgtaatttcaaagatgacaaatttagtttaaacatggggtactcaagtgaggcatgtacaacatatgacccttaaatgttgtttttacttttcattctatggtgaaagaacattaaaaaataaatgtttcaacctgttgattgatggatgtttgacaactgacacgtgaaactctaaatgttaagaaaacaacacatgctaggtgttcatgaagcattgttgctgatgttatatgctgccataacctcttcaacttccacatatttaagaacctgattctctaatgcagtagtaatatataattctaatctttttctaatacttttgttgccatttagcgtgagggaagaaataaagacaaactagtccttgataaatagtttttggatcttattttaatcctttaagaaaatctattttatatttttattgacttctatagtttactcataatgaaatggttgaatagctaaataggcaataggcaacactgcaacagccaacagtgatagaagagggaaatggaaaccacaactgtttatacaagtgtgatgaagcacacctttatcaaaagctgagtcacatctttcttcgtacacacttgctcctctgtaagattttcaacatagacaccagatttgacatcttctctaatctgaataagcatcaaaagaccagttctagtataacctggttaagcatgatcgagggaaaactataatggaatagattttacctgtaggtttctttgatttggatctaatagatctgctatttgctcgttgtatatctgcaaaacaagttcacacatcaaaaggactagataacaaggtcaagcaggacagggacatagaaagaaattatcaacagtcattcaattcaacctcgagaaaagagcagtggcactgatacttgagttgcttgtcagaatgcctaatttgctcctgtgcatgaaacacaacaatgaaaatcacaacaaagttcatataaccatcaaaggattcaatcacaaatagaatagaactcaacactacctcatttatgcaagcaaagagtctttcaaaaacacgaggtgcaaggccttgttcatcacttgctgaattgtcatctgacaaagcattggcaggaccccacatggtataagttttcccactcccagtctatccaaaattttcaaaaataaacataatcaatcacgagtaacaagagaacataacggcacaatgcaacgcaaaatgggaagaaagtagaaacctgcccatatgcgaatacagaactattaaatccagccaagcaattctctacaagaggcgccccaacaagctcaaaaatatccaactggaggataaaacagcaacccagttactatcacaaaatcacgagagagacatggagaacgagttaaatgtaataataaagtaattataaacttgtatcatgcctgagtagcattagtgtgagcaacggaatcaaatgtgaagctctgaccgttgatggacaaggaatcactggaaatcctctgaactatggaatctccctggtccccgtcatcgcatgcaggcctcattctcacaataacctagaaattagaatataaaattataaattaactagttaaaaaagaagaagaagaaagtagaatttggaatggttgttgaccttgacggcggaaccagaggtggggggaacggaatggtcggaaagcttgcgcttaagagggttagggttgggaggttttgggggcaagggggaattgaaaggaggaggatggttctctttgttcttggatttttgctttcgcgtgggtctgggttttctgaaagcgtgtgcggaaggagtgtcccgacaccgaaagattggattttttggaagcatggttgcaattgcagagaacagaacggagaagagaagagaaagtagggtttgggttgagaagggaacggagaatgaagaaagtagccgttaggggggttgggaaatgggagggatttgaatgtcagcgcctgtacggttcttgtgtgtccctgagaaaataaatttattttctagtttctatattgagaaaaaaagttattgtcactgtaaaataatataaaattggatgagaccaaaattggttcttaaaaaataaaaaatttaaatttagtgaatgtataaaaagtataacacattgttattattgaatttgtgaaattattttatcttgtaatatttaaagaataatttaaaaataaattatatttttaaaaattaatttaatattaaattattattaaattatttataagattaatctatcataaaatattaaatttaaattttttattttttaatgaccaatttattgtgatctcacattttcaataaccaaaatgatatttattcaaaataattcttattttttctaatattattttgtttttagtgtttattattcttatttctattgggagaaaaaagaagacgcaacgtgtctctctcttagttttaaatttttaaataaaattaaaatataattaataaattattgtagatctcttattttgaattttttttagataaaaaaaaaagtatggctacttggctagaggacgatttgatttgaagaagaggaaaagttgacgaaatactttttatactcaaatgtgaaatgctatttgcactattgtaagaggtccttattatatctttcattaaaagttttatttcttaaaaaaagtttttactcaatgactaaataataaaatatcttcttatatctttcattaaaagtattataccttgtacaattttttgatcccctgtagttttttaccaaaagatattgtatatatcttctcagcaattcaataatgacagatggagaagcggtcttactcaataaaaatcttaatgcaatacaaccaaaatttagttgtcataaaaaataatcctaagctaagaaaacatttgttttacggataatttttgtaatcccacaaatatagggtaaaannnnnnnnnnnnnnnnnnnnnnnnnnnnnnnnnnnnnnnnnnnnnnnnnnnnnnnnnnnnnnnnnnnnnnnnnnnnnnnnnnnnntttttttatctcatatttgttatttattatgaagtgataaaataattaatttcaaacatatttcatttcaatgttaagttataattcacatgtaactaatatttaatttcggacttgataagatccaatattctaaagctattttcatataatccaattgagacattttggaatagatcaaatttttcttaatatcttgttgagcaataactaaaacagttcctaataataccataatccaattgagacattgtcttaccaaatttttctttgttgagcaataactaaaacagctcctaataataccattattatatctataaaagttattccgttcattgttgaatgtaaaactatgaaaattcannnnnnnnnnnnnnnnnnnnnnnnnnnnnnnnnnnnnnnnnnnnnnnnnnnnnnnnnnnnnnnnnnnnnnnnnnnnnnnnnnnnnnnnnnnnttcttgtgataggaatctctttatgaataaaaatccaagcaaattctccttcctaccctctcaatgctcctttatgttacatactataattttctctttccacaaatttcattctttactacagtctttcattcctatgtgcccaattacattcacgcaaaataggcatatattggaatctctctctttatatatactcgtgaaagatactcaattacatactgaaaggtgttatgtgtatgtaatgggctgaaatgaaataacatattaatatacttttaataaaataaatattcatagtatacattgatatgtttctatttcagcatttctctgaatctgaacgaataaactatccataaatatccttattatacttatatctattttattttattctgtttttgagaggaaagaaaagtctgtgatgtattcagcacagaaattaatgaaaataagttactgacacgaaaaatgtgtcagtaatgacccacaagtatatttctgaccgatataaccgtaaaaaattttcatggtatcctttactgatccacaagtgtattttccgttgaaatttttttactgaaaatttcccaagactttaccgacagatatatttgtcaaaaatttccgaccgattaacttttcaagaaattgaaaattaccgacttcggaaattccagttttttttattggttgttagataggaaacttaattaacatttatgcaaagttagaaattgtgagatttattttaataattataatataattctcaagaaaaaataactcaatcaaacagacgtgttttatttatgagaatataaaaaacatttacagtcaattttaataattaactaaaaaaaattttgaccacatatataaggaacccaaaaataacattgtcattgtcacgttatattatgaggaaaaattaaataaattcccgagacaaaaagattgtccataaaataaacgtcttaattgaatacacgcctaagattctcaaacattctaatttcttgagacaaatgcattttcttactattacttcatgttaatgttgtttaacgtttataaatgataataaaagttagagaaatgatatttgtaaaagtatcacttcactaaaataaaatatgtccatagtaaattaaaaaaaaaaaatagagaaactctatattcaaaacaatggaaatatgtcaaactagtttattcatatctgaaacagaaactacaaacatatatttgtctcttcacaagatgtattggtattactacgattagaaggattaaagcataataaacaaattaagcatgttattatgagttaaataatagtagttgaaagggaaccgaaattgatcatatttcactgagtggaaggagcgaagttgagaagctgcttggaaccaagccacggcttcaccaccacaacggattcgaatattctggaatctccaacgtcgccaccctgcgtggtcaatatcttcatgtagtacttgatcccagacaccacttgttgttgcgcctccaccacttccacgaacgtgacttcctcctcctccttctgcgcctgcctcagcatccggttatgctcctccaccgagaaccgccctaaatcctgcacctccttgttcgccttcacgtcagggatcttcgaccttcccccgaccaatcccccgtacgacgccgtacacgcgatgcatgccgagatcgtcaggatcgccagtgtcaccgccggtgaccttatcaacgccgtcatcgatcgctcaattatgccgaacctgttagaattaatttagaacgatgatggagttgcatatacggtgtcgtttatataaagggagaaataggtgtttggatacgcatgaaaaactaaccgagagaaggtgaatggcatggggaaacggaaaccgcgtgcgtgtcgcgattcggatgcgagttttggacggaaatgagattgcttttttctttttagtttgttcaatgttattgccgtattcgagttgttggtgtggtgtgtgtgtgtgtgcgcttttgttgttaggttaggtttgggagcagatcacatcgtaatcgagttgtgttggtgatatgattgatatagggcaatgcgagagagagagtcagcacagtgcacaggagcaataacgaatctagtcatgatcgagtgtgccaagcgtaaaatagttggcttggtgtggtttcgacaaactgacacataggctcgcactaatctgagaggcttccacgtatactccacatgcagtttgcatacaattgagatcaaagttttaaaaattgatatgagctcatactttcacaacaataaatacatttgagagaaaagcatgcattagatttgttgttgagagataaatattaataatgtataatacttatttcatgtttaattttattccaatataaatcgttcgtagaactagaattgaacgaactagttagaacatttaagtgtacatgtgtaacctactttcgtctgagttcaattccacattatatcccttatcgtgtctagggtcattaattctgatattcccatgcgtgactatccacacattatcatctagtcgttaccttagatctcgacggctaccacctaagtaggtttgtaccagtaccataaacatgactttgagataagactaaagcgttgaccgttgctgtccttattaggtcaatcggtgattaggatggtacagattttaaaaataattatgagatagagtaaataataaaataagtagatgacttttttcgtgtatatatagactccgctcaagctttttgttgtggtggtatttttcgtgtcttttctcgtatcttttgtgtttcatccaatggttgacctataaactatcaaatataaagttagagtaaaattttgcatgtcatttgtattctgcctcactcttgtgatgaatgattactttataacaaagttcgtattaatacgaaagaaataaattaggtgaattttaatacgaaagagataaatcaggtggaaaaaggagtaatatttgtagtttttgctacttgtaacttgtaattctagcctaattattaatactttctgtaaaaacaaaccaatcattaatactactaatgattaatttattatcacgattgttaattctaactgaaaaaggctatagagacgtgcatggctatgttcaacaatactcagccaattccaaggggtacacgagccccattcctgagccagtaaaggggatgactgatgaggaagaatgacaaaaggcaattactaccataattttctaattaggtaaaattacctcaattgcttttattacaaagatgtattttcttctttcttggtacataagttttatataaattaaatgtatcacaaagatatgtgaaagtgtatgaacataagtgattacatttggtaaatgtttatatctcgtggagataaaaaagaaagtaaaaatcatgcaataaaatgtattaatatatagatatggattacaagatttaaaataggtttttaatcattaaaaatttgattttagttcgtgtcatttaaatcaatcaatttgatttctatatttttaaaaaataggtgaatttaacttttgtttaattcctcaacaaatcgatgcataaggattaaatttattataagattaaattgattgattttaaaattatcgggactaaaattaagtttgattaaaattagaatgaattgaatttgcaaaacgtcatatactcatattatagagcttcattgcaaacaagttgttgactcctatttatccttatcacccgataattcaaagctaagacgtgcagattattcacagatgcagacaaaagcttcttgagtttcataaccttgaggtgcgtttaatccgaacacaagcaaatcgggttcctcattctctcgcaaggctatcacgactgtattttaaccaccaccatgtttttgaatttattcctatttgtattaacacttttatcatggatgaaatgacataattaccttttgcgtaaaaaaatatgttacaggttaaatatttttttttgtatattctttatttaaattattcaatttaattttttattttcaaaatactcattttgatatttaaaaaaaaaattaatgttacctttacatctgttgagatttttgataaacatgtatttcctttaaagaaaaatagtttttcatttaaccaaagtcctataatatcatgatcaatgtatatgctaatgctggagttcttcatcaaatggagaaacttttccaggccatgcagaggcaaggttatttgcctcattctttcacatatctctcccttctccaagcatatacaaggagcctgaattattctaaagccgaggaaaccatacatgctatgcaaagcaaaggcattccactgtcttgtgtccattttaatattttactccacgccttcataaaagctggattgattgattaagccaagagggtttatgaggatctatatataaacttttggtttagttcctgatcttgtatgttaccgaacaatgccgaatggttacctgaaatgtggatatgtggaagaaggaatcaactttttttaaagtatttgtgaatcaacaaaaggcgacaggttcatcatgagtgcagctgtgcatttttacaaatccgttgggaaggaaaacaaagctaaatattaagttcaatgaacaacatggggatcccgttcctcaagaaatttgaagttggataagcagagagtagaaactccatgagatctaacctgcttcagaaatactagggtatttgaatggcattataataatggacaaaggaatttgtgactagagaacatataaatctaatcaacctggtaatggcgacagtggatactacatgtatatttgcttgcgattatgattgggctcttagttcagaaggactttgcctgttataaggaggacctgatccacgtttcatatgcagcttttgccttttggctgcttttaacttttgtccgaccttcctttaaagatgaggttgaagaaagaaatgcattatatattccatccagcaaacctttgctataaatgatgagaagacagttctcgaagctcatcggaataaggtggcccctacttccaaaatttcagcggcagagcattttatggatgaagctcaacagtagaaagcagtttcgaaggaacgggttgaggttgaagaaagaaatgcattgcagagactatcgggtacaagaaaggagcttgaaaatgtgaggaaaatcaaatcccatggtggaagatcatagaaatgttccgcaagaatttgagcacaacagcattgtcgctagaaatccaggagaacttgtttattgctttgctaaacggccaaatttattatgtttgggaggctacgtgttattaaattgtttactcaaattctacgtagattaacacttgactcaaaatggaagacttgaagctaataaattgttcagtctttttctattataataaaaaaatactgtttagtcttttatcaatttgattttgagattttaataatctttttttggatcttatggtgtcatcttttaaattttttactttaatggtaactattattttaagatcttaaacttttttgaaaatctaaaaaaaactcatcttttaatatttatttataattattttaaaataattaaaaacaattaattatataattttttatttttaaaaatttataactaaaatacaaaatttatttttaattaaaatatttatttatcaatataatttctttttctttttttatttctattttctttcccacacacttcgctatgtccccttcaatccacatttctcgcggtgctctggaacttccgatcaggccatggaatcgtcttcggccatcacgaatcaaccaccatgtctctatgcactgttgaattattttattatgtattttgttttaaaattatattattatgtactttcttctggactattcaatattccttgtggttgttgatccacaccaacccaatgtccttttttcttccgaagttgtcacggttgtgattattttattgttatgtgttttattttaaaattaaattattatgtactcaacttttttctggactgttcatggttgttgttgatctattcccttcttcctttttgttgatctatttcttcccatctttttgccagaattatttagggaaagagaataataataattgattttcttaaaaagcatagagattttcgaagttatcttataagaatcaaacctctaatatatgaagattttgagaatgtttgaaagaacaaaatcttccccttaaaattctctccaaaatcacccattgaagatgacctaaatttcctcacaccttggtcttcgaaaagtttcacataaaaccacttcgtctcgtgatgtgatcgcaaaagccctgtatatgacttctgtggtagacaagacggttgcattctgattttgtagcggtagaagaagaaggagctaataatttgtttacaaactaggcttagagtagcgaaaagagcctatagtatgttactcaagctgcctcctaaatttttgaatacctattatcaagtcctggagaaaaatatatgatacgtagctacgagggcttgccgtgtcagcgtagttgattgcattgcaattttagaaaattcttgacaccgaatcctttgtttaataaacaataacataaactaaactataattgaaaatctcagtgattcagggaacaaggagacatttagaattgccaaaacttgcttcacttcatttcttattagccatcagtatacatagcttgaatacgtacttcatatgaaaatatgcttatgagccatcagtagacaactgacaacctagaccatatgcatttcttcatatgaaaatcacacaagatatgagaaagctatttatgtgaccaagacttcagacgacacaacaattggaatacgtactattatggtacttgtatgcagagacgaccgcagacagaggtatcttccaaatttaagctttgctgtcaatagtcattggcacaggctcctgctttgctgttgctgttcttgcttgttctagtttattcatttttgcaaatatgctgccgtaaaactgcgcgtccttcttgttatgttctctcaccttctgcttcaaaattttgtactccatcttgacatccctgataatatccatcgaacagtggttaatacaaaaagaaattccatgtatcagtgttacctatttagaactaaagtatatgaactgtatatattcaagttgataacacttgagaacaaaagcatacctattgtctggctcaatctcaagggctttcttaatatccatctcagctagatccaaatccacaagatgaagatacgcttgtgccctccgatacagtgcttttacatttctactatcaagctctaaaacctgcttgataaagcaaaagtcagatgtcaactattttcactctattccctttttgaatcccgctaaggctaaggctaaaatatgtttccaatcattacaaattatataaaaaataaaaaatacaataacataatttgtgatatttttaattgctataaattataaattaataataaaaaaaaaaacaagtcaccacctgaaccatcaccaccacacctaaaccaccattagcaccacacctgaaccaaatacgtaccacctccaagccaaatccctcccaaatcagaaatccccacccccaatttgaaatcctagcccccaaatcagaaatctccaatcatgacaacaccaggactttgccgcactcgtcggtggtgttggtggtccggcgaggctatggtttaggaagagggtaagtgaggtggcgggagggagaagaagaggctttaggagagagaaacgggtagaagagtttttaacacgtgtctatatttcattgtctaataagtcagcttacttgcaaagtcagttcacatgtaggcttggagttaatcgaatccaacttcaagcaaaaaataaaaaaaaggcattcataaaatacgaggacaaaaaacacaacataaatatcgtaggaaagaaagtaaatctcttaggacggagtatagggtgcgtaaatgaaaagtttcgtctgatgcaaaaataatttagaccgttggatttaaatatctcatcaatatcaagatgagatgatgaagtggttatcggatatgttgggaaaggtagtaatttttattcagttgtcaaatgcgcataactggacatcgcctacaggctacaatttttcgggaaaggtagaaattttatttgaatcaccggacaaagcaaaatcaacaaaaaaatgtgaaaaatactgaaaatttaagtaacttgattataaaaacacaaacagttttattttgtcaaatttgtatacttttttttttcaaatttaaatattcacacaaattaattgttactacaagtttgaaagttattttactttttcaaaaagttaattagtagaattttgattatgatcatcatattattatcttttcttattctattgataagtctaacttacattgacactgtcatatcatataacaaaataaaatcaaggagacaaataaaaactaaatatgaagacatgagttaggaggaaggaaaaaccaagcacacaatgttccactttggctcactctctcattatgtacaaattttactaattatttcatctctttttatgttaattagacttaaaataggaatttgggtcaattaaattaaacgcagggtcatatatattctaaacttttgacataatcgaaaacctataaacttttgacataatcgaaaacctatatgaccctacgttcaactcaattgacccaaattcctattttaagcttaacaaacaagaaagtataccatcaacataagagactgagcaattagtaaaaatagaataatatgtacttgacttttccttcatcagaactcatgttttcatatctaacttttatttgtctcctttatttattttagtatataatctcaacgtatcttagacttaccaataaaataaaaaaataataaaatgatcatcataatcaaaattctatttattaaactaattaactttttggaaaagcaaaagaactttcaattttttagtaataattaatttgtgtgaatattcaaattcaaaaaaaaatataaaatttgacaaaataaaactatttgtgtttatataattaatctatttaaattttcagtgtttttcacatttttttttttgcttttgctttatcaggtgattcaaataatttctacctttcccgaaaaaaatgcagtccttgactctgttactgtagcatgtaggcgatacgcatttgacaactgacaaaaaaattattacctcacatcacactaaacttgtttcgctcacgcaccctagactcagtcatcttttaggttctgaaaatatatttagccttcagccaaggaaaaagaacaaatttaggctgaatcagacaaagaacctttgtgcacatcttctctgcctgcttgtagtcctttagcttcaccttacaggctgcattgttgaggttgcatgtgattttcaatgtcttagtctgcagtttctcctcatcactgaaggaggaatcatactcgacaaacttcatggcctgtcaacaagagaaaaagaacacctattgttagttcatttttaccacaacataaccgtcagtaaccaagttacataaataagatcttttggaatttataggtataccttttcatatctctttgaagctctttcatatttgccaaccttaaacaaaacattcccttcttcctttttcttcccagctgcctcaatcttctcttgtgtattcagatcccacgattccttttcctgcacccccattttcagtaaatggttttacatttcaaattagttcaaagtttaagacgaagaagacatgataattctctcacttctcacctttacaaaggaaagcagctcaacttcatagtacacagtggaactaggaggaacattagccaattcctgagaggacccagatgggccaaaagcataatcaggctgtatgatcagcaatgcaatttcccctttcttcatgttcttcacagcttggtcaagtccatcaattacttgctctacatggtcgatcaaacatacaacttagtaactagtaatagaaaaagcaagacttatgaagtttaaatgattgttagaggtaccttcatcaattttgaactcaaatggctgttcatcatcgtagcccttcttaacgaaaacagttccatcttgcagcttgccaatcagtttcactgaaacaaaagaaataatgaaactcttcagcatcccatccagtatatacaaaacctttaaatgaagaaaggaagagaagggattgaaaatattgtaataaaactgtaccttgaactacagctccatcatttggtcgttcatatccctccccttccttcaaagtcttcttgagaacctttctatccttggtaatgtcagacacggtcttccacgagaccaactcaagatccacttgaagagaagcatttggaggtaccgcaccttcatctcctgaggctggccttccactctcaccaaatgcatctgcaaaaactttgaatgtcaataaacttgcacaagcaaaacgtgtagacataagtattgctgataacaacagtcttactcacattgtggtttcacattcaagagaactttttctcccttcttcattgtttttacagccttggccatagcaggacaaaaataccctgcatgataaaagaaaagaaaaaagtcatattattgttacttgcaacgagaatcaagttacacggtaaggacaaaattcaaacttttgaagcatgagactgaccctcttccacagtgaactccaccccatcagattttgaaatgactgtcccatcttcaagcctagcttcaaacttaactgcagaaaagagagaaagaaggaaactttaaacaatactgaaagtgttgctaaacagatgaatctcaaagacaatacaggatagagtttcgtaccaaacacttcatccaggtccttaggattgtcccatttctccccttcagtaataatgttcttcaagattcctccatccttgcatatgtccttcacacttgtccaagatagcaactccacatcaaactgcagagttgcatttgggggaatagtaggaggagacccagactctccataagccaattctgggggtattgtaaaaagggcattctcacctttcttcatggttttgatgccttcatcccatccctttatcacttgccctgcattaatcaagtcacaaaacattaaatactatagttattcattcattcatcattaatcactttagtttaattttcatgtccagcataaggataaattaaaagactttcatcctgattacatttgtgatttattatgtatgtaaatataacattaacaactatttttttaatcaatgaatgattattcatctacatacagagtacagacaataccagtaacaaaatttcaacttaatacttcatcaattactcaaacctcccataactaaattgatcctaatcaatttttcacttttaagcaaagaataatatcactcagcaaagaattttatatagtcgatcaattgaaatcctctctatataaaatcaataatccgcctctacaaaacaaaagaaagaaaaaagaatgcgtaccttggcccagcttgaacttgaagggggtgcccctatcgcggctggaatcaaatttggttccatcaagcaaggttccagtataatgcacttcaacttggtctccactgtcaggggtgtcccaaccttcaccttcctggagcaatttcttcttcagccccattttcccaatctccttctcctccccgacgttcaggatcggactctcaaactcttcctcctcaggcatttccatgttgccagcacttgggaactcgaagtcttcgtccatggcttcccacaacaagcgaataaatgagtacgaaagaggtgagttcttagaactcagaaaaccacacgatcacagaaaataatttttttatatttctcacacgatcacaagaaatggtttacggttatcatgtttatataggtaggagtggaagaggagagtgtgtctagagagttctataatccaaggttgtcaagatggttccagaattatcgtgttcgttccatttattttttactattattgtggttatgatgaccaggggtgcctctttatatattttaaataaataaaaaaagggttaaaagctaaataaaataagaaaaaaaattaattaactaaaaataatggattaatcattaaaaaataattattgaaaaatagaattactaaaaatatgtatattaaataaaataatttttattattaatatagttataaattataaaaaatataatttatgttctaacatttataaacaaattttttcatcttttttatcttatttacattttttttctctttctttatcctatttttatctataattggattcatttattactaattttagttaacttcgaattaaaaatactgttgacgttgaatctaactaaaagttgagcaagttttttctttattttatttttattaatttgatttggatatcagaatctatttatatttaaattctatttttcaccgggaagttgtaagtcacacgatattattttagtttgataaatatttttgtgttaaatctttattatatagttgtcttaaataactatttttgacatgcctctttccccctccttgctgatacttgaatatattgatcatgttgtattgcagttaccagagcccaaacggtcaatcagtgcttcgagtcaccatagtaactagaagatgggtagatgttgctgtttgctctgaggtagtttcagttgtttgtttttatatttgtggctaaatgttagtttatttctcattgtcaaaagtatagttgtagcttctacatttatcataatattctcttgactctttccttgctgtcacttctgattctaaactttggcatagttatctaatgatttacctctacatgcatctataatataaactgaatttttatgtctaataccttatattatatggaatttgggaccatttttttgtgacaatttaattgttaaattgattaataaataatgaccaattttttatatccatttaatagaaacagacctgtttcagttactgcattttgtaagtattggataaaaattcgtgtataacaaaattggcatagaaataactatagttggcaaggtcatattgtaatgtgatagaactggagcagaaatagctgaatagtgctgcattgtcactgaaattctactgctgatgtcagaggactacggttgcagagaaacttgtagaaactcttttcctcacttcctcttcagagaacagaaaagaaaatacaatatatctaggcaatttgagaggcctggttctcccatactgtccttactcctttctcaccactttttgttttccctcttagctgaagcccaccataactttccatgtttgccacctgttcagtgggtagttacatgaggtcatacctgtcacactacctaggtgtgggattaaattaaagttgcctctctttcctttctcaaatacagcttaaacttaggatgcctggcataatatataactaaaatggtgtctccaagcaagtgtgcgtgcattgcacacaatgtctgcattgcccacaacaaacaaggaaggacaagccgaaaattgatgaatatatatatatatatatatatatatatatatatatatatatatatatataaaaaaaactaatgtatcctgatgccagaggctcctcacatcgtggatgtatggtggagggtaattgtatgcagccttctccttccacaaaaattgttgaatatatgtgaaaaaataatagttttagggttatgcttttctatattgtcatttagcatgctgctgtatttcagtccattaatgcattttcatcatttaagaagaatgcagttattagaaaagagaatatatattttatctttaggaattggtccaaggatatgaccaagagactgctgcagtagtaatggccagacttgcatctcttaaaatggagacaggggtatatctcaaatcatatttggagagcgtttccctgttcctagattggtagtatgtgatcaacatggttctcaagtaagtacatgtattacattgtttccttttcctgaaatttactagtattgtgagtgttgctgatgtatgaaataccactttcataatgtatgagcagaaaattgtttcattaatccattttgcttggtaggtttagatttttcttgatgagaaccttagttgggtttcactgaagttgaaaaggctagattttttttattagcaaagctgaatccctcagcaacatacaataacgcacatgagatggctgctggttcagatgtaatcttcactgacaacgtgagccttcaagttgtctttgaggctcgagcatctgcagagactggctgtccaatcctgatagtagtgactgacagttacgggttttggactttggtttggacaatgcaccaatgacgtattctacgttttgctgttccattcagttattttcttttctttgttcttaaaggagagctggtcgtagcccatgcctattgaggaataaagaaagttgtgaaatgttattctttagggctatggtcggattttgttcgtggagaaataaaggcatcgaaagtataccctatgtttggttaggaaggaaaaaaatggaaggaaggaaaatggaaggaaaattttaaaatttgaatcggaaggaaaatggaaggaaggaaaaatttaaatttttgtaattaaaaaataatttttctttccattttctctccaaacaaacagaagaaaatgtttcgttaattgtgttttctttcctttcgatttctttccttttattttctctccgaccaaacggactcatagagtttggccctatgtttggttaggaaggaaaaaaatagaaggaaagaaaatggaaggaaaattttaaaatttgaatcgaaagaaaaatgaaatgaaggaaaaattaaaatttttgtaactaaaaaataacttttcttcccattttctcttcaaacaaacagaagaaaatgtttcgataatcgtattttattttcttctgatttctttccttctattttctctccaaccaaacggacctcgggtgttgcagaaagaaaggataatgaaatgtaagttgagagctacgtctgtgacagcaacaaagcaaatgagggtagtttgatcacactaggttgcagagtaattaaagtcattttgtgatgttgtggaatttgatagaattacaacaatatttgcaattctgtatatgaagttagcgttacaggacacatcctggtgaagtaaatactttttttttcccacagtgaacagccggtctcaaaatgtgatctcctttatatgaaggattgcttactgattgctgtgcaataagtcatttttggattaaatcattcaatggtgaaaaaccaaaagtttttaagtggtttaggggatctttaagctgacaaaacccccttcgattagcgtattactcttttataaaacattcttttttagtttttggttgtcaaatgcatgtggtgaaattcaatgttgttctataacaacacgttataattaattcaattttttaacttttaagagttgtcttattcacaataatttataacttatttttctctatcaatttctattaaattattattagttacatctcattttttcataatttcattccctattttaaattttgttgtcaaattgtacagataacatttaatggcctttggatttaccatgatgacattgtagaacctatttggtaaggaaagtgataaacttttactaaaagtatggacaccagtttctgtaccaattaagaagtaatgcattataagtcaagtgcaaaactttagtgaagcaaccttgagtgtggagtttttctcagattcatattatatttggccatttaatgattatgctgtgttccgggcattcaatcccggcctcaggtttctacatgaaaaaattactggcataactttcatattacttgcagtggagcattccagaatcatgttcctggtcacaaaggcacatcacataatgatgacatccctatgcaattgcaggggcattcagcatataagcaaactacgataaaattcaggtcctcacaagtgatgagcataaattgatcaatcaatgatctatcatccacaagttaaattataacatgaaatgaatagttcagatagtcaaagaagcaattcaactacaatcgcggtcaaatttcatcaaaatccttgttgccaatattctcacagggaaaattgttaggtcttcaaatacaatctagagaacctaagaaagaacagattgatgtaaataattgcagaaattaaaatatccgcaaaattattttttgtccaaaaatacaaaaggaaaaagaatcacttctttttcttaagttgtttaacatttttggcattggcttgttctctggtcttgcgtttcctggtgagagcaaactctccaaacttatgacccactttcccctcagtgatcctacaacgaatagtggttttcccattgtaaatcttgacagttgtatcaacaaattctggcaagacagtggatctccgtgaccaaatggtcttgttcgacaaaagatttgggttcttcttcatcttgtacaagaatgcatcaatgaatgctggtttgcgtgacagcagaggaggagacgggggtggcttcttagcgacagtgtttgctgcatcgcctacaattccaagaaactgcttggttagagccctaagcatcattgtaggcctcattcttcctggtcaaaccaaaaaatgcaaaccataatattaaactacagaaaatcaaaccatcgtgaggtcatttacagatatactaaaggaaacggaatgcaatttttgcttcaattttgttttatccattcaaacataatggccatttggagaggcttggggtttttttttttttgtgccaaaatctatttttcttttccatataaagaattaagtaaatagtcaaattagtccttcaatgatatagcgtaggtcatatcagttcctgaatgatagaaattatgcttaaaggttcttgaatgtgtatttcttgggtcaaatcagtcctcatatcacaaatctcagagactaatttgactctgacagaacacatatcgagagatcaattcaacaacgaatagtagcatgtttggttccctgctggtgcactttccaaagcaattaagcaagaaagcaataacagagttgctttgaggccaatgtaagttaaacaaaaagctttaaatacatatttggggaccgtgaatgtaaatttcacaattctatattactgatgtatcattttggcactaatttgattatttactctttcaaaataaaaaatacttcaaaataaaagcaatatattacgttacttgtttatttcaacagaaaacaaattgagtaacaaatttgacctaacaaagaagcattgaaattaaaactcaccccgattcggtctccaatgctgaaatccttctgctcgctctgaagaaacacgagaattaactgaggaaaacgaaaagaaaaataaacgcggttaggttaaatgaaaatgaaagcaaaatagcgtcagaaaagagaaacgcaaaaatgaagaagtgtgtgaatggcgagagaaatgagatgataaaacgcgattcccaaacacaactccgttgaatttcccgttcgagagtagtacaaaacccgggaacgggaaattgggaagacagactcacagtcgcagtaggaactagaaagcaaaggcgagacagtgtatagagaataccgcagataacgaaatagaagaaatcgaaagaataaggacctgatcagaaaatggaggaatggcaatgagcggcgacggcggaagaagccactgaaatggttgccggcgggaagaaccaacggcgttagggtttgggttatgaagggaaaggaaaggcacattttgacgtgctttgtgtattatataaggttcgtgttcctgactttcttctctctcctttttttagtggtttggtgtgtggcttaccggaagccactaaagtatcctcctattatttatttacttttaaataggttggtgcatataatttttatttttattttatactgatgcatgtaactttctagaaaccgcgtaagaatattttattaattttcattttattatattctttaacctacttatacaaaaaataacacatatcctctttccattccaaaattatagtcttttaagattacgacatactctttccattccaaaattatagtcttttaaggttacgacatactgattaaaaaatattgaattgatagaaatttagataaaatacgcttaatttttcaactattttttatcataaatcatctcattatccaccaataaaaaatacattctactacttattacttatttttatgatatatatctctttttaatgcaaatattaatggatcttcttaattacactatccaggcatatttttagaaaattaattttaagaaactattattttggaataagaacaaaaagctataaagaaattattattttggaacggaagagtatattaacagagaccgtgtcttcttgttttgttacgcaattaatttaggttcttgttctattttagagtcacagctatggaatatttgacatgggttaaagctggcttagagtgtaaaatttcaaaagctagttgcttactttgactacaatgccattaatttctttctaaaggttgcggtgatttctattcttgctataatttggtgatgtctattcataatattcatcaatatgtcaagttgtgaaatcatgtttatagaaaagcaaatcaaattgctgatatttttgccaagcgtggtgatgttgttcataactttcctgttaacgccttatggcagaatcagcttgtatttcttcattttcttttttaggttttcagttcttatttttttttcttctttttataacatattttgtggcttatgctaatatatttacttcacaaaaaatatatataatcatagtattatgtttttgaataaaaaatcatatgcacttatcaaaatttagagttgattgaaatcaaaatcgacataataaagatagattttataatcttttgcattggattacatctaccctttacgaaaagaatataaggagggacatgcaaaataaaaaacaaaaatttcggatacttgattgtaaatattattataatgacataataactcttctacataattcattacttataaataatttatttctaatagataaataagtatatacaatttgataaatagcttggataaaatttgtgctcttatattagagttgacgaaaaagactaacatccatattttaacataagttcttgtcatgttaattttatggactccaaataatacaccactaaagaaaaccttttcttttttatatttttccacacatattacattatatactaataataacaaataaacacgtaaatttatagtactctttcattaaaagtcaagctaattaactgacttcgttcattttttattttattttatgattgtagtccttttttatgattagttagttcataatttcgtattcaattcttaattaaatattagaagcaatactatataaggttgtatattacattagatatatnnnnnnnnnncacaatatccatattattgataaaacaatttatttgatacgtgaaaaattcttttgaattagattaactagttatattaatttctaaactcaataggtcagaagacacgtgcgtttaggaaaaaaaaattcaaatactatttttaatttagaaggaattataaaactattaaataagcatttaaattagaattcagattgaccaaattttcaaaaaagtcgtgctaaacgttaaaaaatcttcaagatgacctatagagtaacagattatatttaaccatttttattttcaaaattaagtcagctgcttggcggtgacccaatctattttttcaatttctccccccttaattacgataaaacaaagcaataaaaaaaattaaaaagtatacaatgttttaaaagaaaagaaaaatcaaaagacaaataattagtcaaatataggatgcacaaacatatgcatgatgtgaaacgcggttctgaccgaacaagtcgacaataatattaaaaaaagaaaatactaagaaacggcactgcctcagaaaggcagaaagtggaaatggcaaggcaccagctatatatacgtcaatccactctggtttttcccataacacaacaatcaacaatcaagaatctctctttttccattttcatgtctcttgtcttcatgtaacacaccctttctcttttctcccctctaagaaattctgagagaagaatagaaaagagggtgaatggttttttgagttttgaagaatagctgcatggggaagctggttgagattcttgaccaaggggtccggattgctgcaaggtttcactctaattgcccccaaacaggccgtaagtactaccaccctccatccttctccgacaagcacgaccaccactaccatggtggtgccaccacaagcagagtccaagaggttgtggcggcgaggagcgttgacgtaattctttattctgtttgacagatccatatttgtttatttttttggttgttcgattcaatcattgtaaggcgattcatacatgtattttcgagctcaagttgatgcctagttaaaatattacaaacacttttctatgttatacttatacatgttgattttaattccgtatcaaaaacattaatcgaactttcctataaaatctctatatagatctggtgattttacgcgtatgacaaaaatcacttagaaatttgttgactaaatgtcttcaaaggcttacaaatcctcatataggtcgtattgattaggcaaaaaaattcccataaactcatcaagatttgaaccccagtaaaggtttcttattaaaattgaaacattttcgtactgaattgaaatataagctcagtttgcaaaggtcaacgtttgattgcaatggttaaaatatgctgaaaattcagacaacttccctgttgataatgataggactaaagccgtctgcaaaaatattcataagtcataactatcattgtttgacctgaaaagaagttcggctcttacaactccatgtctccatccaacataatagaagtagtaaaatgttctccccaaggaaaaaaagaagagggagagagagaagtaacaaatggtgcagggaagactatatcgaaccgacttaaaaaatgattaaaatcaaaatggaggaaacatcaacagggtaaaatgtctgttggtgaaagccatcactactaccctgctgtagcctctgactagattgaagttttaaatacaggttgtgatttcatcacgtttcttgatattgctggaaattgtggagaaatacagtcattgcaatagcaattacagtcacagacacccccgaaaactttgaagttgtgactgaaattgtggtcatggactgttttttaaaaccttgactacgagcatatatgaaaaaggtacaaattaacagaacgacacattatgagtaattctcataaatatttattgtagcgttttgtgaaaatgagcaattacaaaatggtaatgtaagtaaacactttttgttgctaaaacaggtacacttctatttaaatattaaatgcatatttgccaccattttgtcactgtgataattgacaatggattgcagactcagaagtgtagagcaaattggagaaacagaagaaaactagggagaagaatctgttgccatcagaacatatatctcattgcaattggaagggtgaggggataactgaaggaggtgaaaaccataagcaccaacatggtttgtggtcccgaaattgcccaaggcttcctgtaaagaatattcagaaacagaatttgaagatatgactatgcttccagataatgaaccttgtatgctactaataattcctctgccttttctctggactgtgatatatacttgtccaagaacacctcctcactcctcagacaagcacaacaaataaatatacctgggaaccttcctgcaaagttttttttttttttttttatcgagagctggaagactctatatcggggaagcacgcgatccttcatgctatacattaaaacccttggctgatgaaccaggactgacttgggcatcataagtgtatgcaagaagaattccattccaaccttcaacttcttccctgatgttctaagcaaagttgggggatcttctaaacattgcaggccttcctcattggaaaaatcgaaacaaataattagctccagctttctcctaaatgttttatagctcaaactacttattgaatggattacatggacaagcattcttgaattttcatggaaacccatgcctacagtgcgcgaaacatagtttcctatagtagactgctgtgtgatgagaatacttggctgttgtttgagtagcattgcaagatgagacccaacaatgccacagctctccaagaagacaacattggccataatttttttgtactttgggagtatatatatatatatatatatatctttctcatgtacaaagattattattgatcaataatattttctcttcattcttttctttcatccttgtatacttgcgtcttccttgctgcttttctatgtgagcctgatacctttcatgttatcagagcacatctacgatccatggactccatccttgattctcctcggtctgagacaagcaacatgagcacaccagcaacaaaaatcatcatgaaatctttttcaatcccaattgcagacaaactggatgaagagagctttctgccatggcagcaacttgccttagcctccattcatggtcacaatcttcaagaccatcttgataaagacaaagtccctgcacagacattagaaaaccaagaaagcataatggaaaatacagcatacacccactggcatcaacaagataaccttcttgttcttggctcctctcatcaatgaacatggcattcaaaaacagaatggtaggatgcaattttgctcatgaaatctggacaaagctctagacttatttttcttcacacacacaggcaaaggtcaagcaactcaaaaatcaactaaagtctatcaaaaagaaaggctcagcttcagaatatcttctccaaatcaagaaaatagttgactccttaggagctgttggagctcctctcactgatgcagaacactctgaggctatccttgatggattaagtgaagagtatgctcctctaatcacatctgccatgtccagatctcctcctttctctataattgaattggaagcattcctattggctcaagaaaatatgcttgaccgtttcaagaaaacagagattacccctgttcaagccaacttcagccaacgaaacactgcacaagattatcctggaggtcgtttctcaggtggacgcagaggtagaggggatcgtaccttcagaggtaatagaaacaaaggttctttttggaatcaaactcgattacaatgtcaaatttgtggtaaacatggtcatcctgcattaagatgcttctaccgctatgacaccacatatctaaacacccctcaaggacctcagcaacagtatcctcaaaatcagaatcagagaactccacctccacctccacctccttcttttcaccatcccacatcctatctagcaggtcccgcatctctcattgacacagcttggtatcctgactctggaactactcatcatctcacgcatgactttggtaatctctcatctggttctgaatacaatggttttgatcaggttcatgttggcaatggtgcatgtatgcctatacaacatgttggtcattcttctttcacaacttctcactcacccactatttttaaacttgctaatcttttacatgtgccttccattaccaagaatttaataagtgtctcccaatttgccaaggataacaatgttttctttgaatttcatcctaatcattgttttgtaaaatctcaggtcagcaagaaaattgttctcaagggcactcttaaagatgacctctatcagttcaccaatgtccatctaaattcacaatcttcagttcaaaactcacccattgccctgttttctgcatgtaattcctttgatctatggcacaaaagattaggccatgctggccctaatgttgttagaaatgtattaaacaaatgtaatcttccttctatagttcaaaaacaatcttcagcttcctctgtttgtgaagcttgttgtttaggcaaaatacaccaattacctcattttcactcatctaccatgtataattctccacttataatattttctcttcattcttttctttcatccttgtatacttgcgtcttccttgctgcttttctatctgagcctgatacctttcatgccacatctgagcaaaacatgaataaaatctttctcactgcagagaattttcctaatagcttccacagaagggaccaatgttttcttcaaactaaaagtcaaaatggaggaattcttggaaatgaacttgcacaactccgaaggctcacacccaacagctgaaagagctcaattttgggcctcaagatttgtcaacatcaatgaacaatatctggggtttgtgacggatcaaaaacagaatctgggcttcagaaaatccaatttgtttgaaaaaaaaaaaaactgagcacaaacaatggattttgtgggaatctgctgattgaaacatgtctagagatgtagaaggattgagttctcgagaattcgaacttggcatttagataatcaacaatggaagtgctttccttgagtgttgacattgggttgacaaagaagagagaaaggatctgacagagtaagaagagaagtgattggaaagggaaaataaaagagcagggtgtgacttgagggattgcattaagttaacaaacaagacatcaaacactaaagaaggggttcttgggttgtctattatggttttgcagcttctaaagttgtctactttggttttgcagctaccattgttgagttgaggagactcactcacttcgctgctggtggaagtggttcggtcaatggttgcggagttgggtgatagggtttgggtttctagactttgactcagccctacgccccacggctgggcctggcccgctgggtacctactacctattcaaaaagggccaacttaatgaagggaaaaactttatacaccgctttattacaggcttcaaatataaggatttgctaatccttaaggttttaaggtttttttttgaagttaaaaaatattttttcaaataatttaaaataagagcacacgtaagtttcaaacctgctatcttcacgttattaacatgctccaaccaattaaggtaataggtcaattatgctaaaagtcaattaatgttgatacatataatattaaattttttaatgtatatttaatacacgtataagtttacataataaattttgtaataattaattttgatctaatgattaaagtattttttttacatataaaaatcacaattttaaataaaaatcataattttaataaaatttgcaggtctaataaaaattatatttgtatttacatgttaaattaaaaattatatttgtatttacagtttattaaacctgtaaattttttattaaacttatgatttttatttaaatctatgatttttatatgtaaaaaatactttaattattagatcaaaattaattgttacaaaatttattatataaacttatatatgtattaaatatatattaaaaaattaatgttatgtttatcaatattaattgaattttagcataattgacctattagtttagttggttggagtgtcacgttgataacgtgaaagtcgcagtacatgtgtcattattttaaattatttagaaaaatattttttaacttacgacaaaaacttacttacagatcagcccattggtactaatataattgggtctattagattaggctgaacttaagaaatataagttacatattttaattggacttattttaactttatacttttaaaatttttattttagatttttataaatttaggtaaaaaaataaataaatgcaccaatatgggctagtctaataggtcattgggccttattggactataaaaaaaggaataccatataaaatatgggtaagtttcatccaacctatttttcacgtttggtccaatggattggatagaactaactcgttcattttgtcagctctactataaaattgatactatattatcattattttagagggggaaaacattgttgattgttagtatgcctccaacctactaacattcataaaaatgtttgtaatatacattttctttatgatgcattgtttcttattaaatgaaatttatagagctcaattaatacataggtttcatttttctcgttaagtctcatttttaaattaatgagacatggatttcaattaatagaagaaaatgtgttacaaagagtgttaaaaaatatgacagtactcttctaacatttgtgttgttaatgtattgactaagaatattcattagtttgttatctttgacaaggtcattacttccatgtgactttaaaataagtcacataatgtgtattttgtatagtctaatcatgtaatgtcatgtggaatatatagtcacatcaaccaataaagtttattttatttttttgcaattcaaatctaaggacataataacaaattttatattttggtttttaatttaataatttattaaatgttaattaatctctaacttcctaaatatgaatgtcttcataccttgagcttccccacacaaacccacaaagaagctacttttctgataactcacttgggaggagcaagtcaaagtcaaccatgcggagaaggagttaacaacattttgatgtttttcccaatgttgtgaaaatcaaattagtcatcggtctgatcgaaaatctagattaatggatcaatggtcaaaccagtaatcaccaattggtttggtttgatcttatatatattaaaaatttatagttaacattctttgattaatccatattctaaatttaaaattattattaggataaattatctaatatatcaaataacaatagagtttttaacaacacaagtctatattccaaatttaaaagcattatcatgataaacattagttgaacccaataaatcaatgtatattaaaaacataaattttatgtgttgatactctataaaagttaaatttgttatataattattgactaaagactttagctcagtggttatagtaatgtttatgcaattgagaaaaatgtgtttgaaccatgtctttgccaaaagttgtctttttttattcaaattttaatactaaagaaatgcatgttttaaaatgttagtctattatctgtattttttttgtgtatcactttttatttatgagaattggacttaattagaaattaaattatacaacaagcttcagaattgttttatttatttgtgtaccttttgaaatattttgaattttttttcaaaatatttcaacttttataaataaggcattatttgatttcgaaattggattattatattcctaacccaaaatcttcgttgctgtattcataaaaagtaatagttctctcttcgaatcgtagcgattaatatcctttcaaaacaaatttattttcttcatttgaattgacagtgaattcttttgatttcttattggaaaatgagtgtttacattgagccacatgacccttgtcggaaagcatggttggagaatatgagaaacaaaactgtttcaagaaaggaaaaaaaaaaaggtgagctcaacccaggtcaacgcgagcgatactggacagcatacataagcgatccaaataccagcccggactgacctagacaacaattctcatctagaccattttaataacattggtttttcctaccactctcccaggaagtggaggagaaagtaaaccgtagcagcaacaacgcgattcgaaattcgaagaaaatatattgcttctaggcgtgcacccactaatgttttcaccatggacaccacaaattagttattgaattagaaagattaaagataaagtgattttttttaataaaatactaaattaaaaacaaaatataaaatataaaattttctattaggtcttcaaatttaaattgcaaaaagaaaatgattaattgatatgattatataatccacatagtgttacatgattagattatacaaaatccaagtcaatgttacttattttaaaatcacatcatcgaagtaatgatattatgacaaaatctaattaatcatcattaataagatttttatttacaaatattttttcagcctacactcacatatgtaaaataaaaaaatgaataaatttaattataaatatattgcatatttagtgactaacataaattaaattttaatgtgcaaacaacgtatccttattcattagcataatagatactttaaaaaactagaataattacaatatactgagagcgcatgttcgatttcttgcaatgcactttgctccttttctactccttaatccgtatctcttcttctcttttcaaaaggtatactacttcccgtgacagaaataaaatacacaatctacttgacttaaaatcaaagacttaaaatatgatatatcaattgaatgtcttccttaagtctaacttattaaagctcgggtaataccacaatgcgacgagattcctccctactgaattttaacatatctacgttctaaaaatttgagaccaccgattaactaaaaataaatcaaatcgtccactaattgatccacatgtttatggtcattgaacttttttgagagtcaatttatactcccgcctttaacaactatttctgaaagtaaattccttcttcatacacacatgcatgattgagtctacttatacaggcattaatgagatatccttaaagcagaatctctcaaacccatttctctccttagggcttctattatcaaaggatttaacaagaatgaatccaatgtaaaaggcagaaaccgcaagttagttattatgagacataatctcagacaaagaccatatttccccacccttgggacaaaaaaaattcaagaactaagtccggactaaaatatgggtccaggccaaaataatgatacgttactatatatagtaaaaatgtatgattgcagggataaaataataactgaagatggtcaacatatacaacaaaactcctaggaggctaccaaaatgaacagaagacacatgatcaaaatatgcacctaaagacaaactaaaaacagaaaaatactgtaaatagcatgtcaatgaccagaatccatcagagtggaagcattatcagaacctagtaattttctaccttcgctgaggaccgacagatgtgcagcataccaattgtatccagtatggtctgctcttaactttccttttttctctcttgatgtcagcaggatatcttgctggagagttccattcttttgcagcctctccttttaccacttgagccacaggggattcaggacccagaatggaattaacagttgtcaacccagaaccattcttttccagaactttaccactcttctgactcactgagttttcttccatttttggagatcttgggttgctgctatgggcagcctcacctaagtggctcttaagaggagtgtgctccttactagtgctccagtttgtcaccttggctattatttcttcattcttctttctcccttgagactcattgacaacttgtgtaagagtgggaaaccaagcagcctgtgaagtggaatctggctgtcgtgttttctgtcccttctggacttcagaagcagtggcttttgggctaacctgactaggatcaaccaatgtcattaaagatggtgcttcaaacatttctgattttccagattgctgtgtgtcaggtgtagcttttgagttgttgaagtttgatttccctgcttctgttgatgccagcaagccagttgatggcaaggtttcagcatcaataacagctgttgcatcggattgcattgacagaactgtttcacggatcatgaaacaaaaagtaaaacaaatttttcttccaaaaaaccattaaaatattttagtttaatttctttatacaaataatgcaaggcaaggacacaacaaaagagatggatcctctttcgactttcctctccacctttatacaaagaaaaacaatcctagaaaggatgagagagaaaactatatggatcacgccaaagcaacaggtgaatataattggtgaaaaacattaagagacaagatctaggcatgcatcttcgcaagcatgcaaaaatcattaccaacgaaactcatttggaaatttcagccccaggcaagattcagggatgcacaattgcacacaggtataatagccagtatgtatgtgtctttggtgagaataagtttatgcaaaaagatctcacccattctaatcaactatgaaaagtgggtaatattgcagtatagcacctggatctacagataacttctctttaacaagcactgcatcacattacctggtttcattgactaaccctagcatattacaatagccctactatagaatgtatcaagacagtacaaatgttttctattaaaaacaacaaatgtatatatacctgaaaaagagccccagttgccttccaaactgtcacaccggctacctgagtcaactgaagcatcaactctggatgaaccaagtttacccaagttattaccagcttgatcttgaacaggcactgcagtaagtccagacacttccctgtcaggctgagcagaaggttcagtagttaaaggagatgtatactccctagcaaggtcttctgcagccttcactaatagtccagcatcttgtgcttgatgtgacttggtagaagtatcaacagacttgttatattcttcatttagtttgatattaatatagacttcatcttcttttatgtctttctgggcacctggtagtggatttatatttctgcactctgtaccatttgacttgttcacaggcccatcatccacaatgtctaaagactctgaaatagctgggctttcaaaatgactggtagcagatttgggcaatgaagtatcgctcacaatggacctttccatgcattgagcatcaggaatatcatgttcatttttacccatttcaccagcagcatcactcttaccagtgctgtcactcttaaataaggcatttgattgtttgacttcagattgcaagatgtcactgggttgaagatctttcaatataatttcaatatcattttctacattagatcctacaaccttgccatctgaagctacatcatttatttcagttatttttacctcatgatgacttgtgctgtctatgttaattgccctagttgtttcactaaaggattcatccctctgactctcgttagaagaggccattaaactaccttctggtaaacttatctgctgggaatttttacacacatcatcagatccatgctcttcagaaaggtgaaccatacgaatttcatttgtctcagttttggtagcattcattgaggcatcaatgtcatctgatctttgatgacattcaactgtgagcttggctggagaaactttggtacactcttcggcatgcatttctttaggcgtaggctccctgttgaccagctccatcttcatgctattatctataacatccatatctggagagaggatgtcacttttttcactcaattggtttgcgttgaaatgaaatttattttcctcagtaattttgtccttcaagtcatctccctcatatttcaatgactcagatgattgtaggaaaggattttggtataccactccttcaagatctttaaagtctccatactcactctgaggatgcacttcatcagatctatcatcacatgtaggaagaggattaacattaacatttccttctcccttttcctgcaaatttttgttatcactggaagtagcaaactgtatcatacatgcagagtctccctgagcatcatttgtcattacaactgagtttaactcaagaggaaggttatctgggggcaacaaagaaaggaactcagcaccattcttttccttcagatgaacagctccatcacccacttgatgatccaaggaaactacaccactaactgctattttagacacttcttcactcgtttcacctacaactttatcagatgattccacaatttcaaccacatctctgtaggaattaagctcagcaccattattttccttcagatgaacagctccatcacccacttgatgatccaaggaaactgcatcactaactgctattttagacactccttcacatgcttcgccgacaacattatcagatgattccacaatttcaaccacatctacagcagaattaatctcatccttttctttaaaattagtttcctttgcaacagatatcaaactgcaatctgtcacattctcagcagcatggattttcttttctggcaatatatcaggcatggcttcagtttcaccaagaagtgagtcacttgacaaaccaaaaaaaacatcactatccacaatagttgattcctcagtcctcaagtctgcaatggaacttgacaatgggtccacagtagggcctgacaattgaccttgaaactccaccgcggttcccacttcaacactttcattttgaaaaatattagaattttgaatttggctgtcatcagttgacttgtcagttaactgacgtgcatctgcagctgtgaaacagataatcagacatgaaagaaccacagagaagaaacaaagaacacagtaaaagggagatattgtcataaaaaatgcctattcaataatttcttagaaaataattatgtaggttatgtcatgtgtgcgcatcaatatacttgtgctatcctggatatttgcatcaataaaaatcaaaacaacatatctgattttccccccttttaatataattttacaacagaagttaacttaaaaaggtatagtttataacatatctgatttttcaaaagtttctaacaagcaaataatactcaagttaaatttcattgaacaaaacaaagcaagacgaatagtgcacgtttagtttattgatgttcatcatgtagcagtcatgtgaaaagatgcaaattttgctttcatcagttgagcaatccaatcaacgtatacaaattaagtcaataaactgctttagagatttttttgcaatcatcaagcttaatacctgtaaatcatgcaaaaacataattatcattatttttaattaaccaggccaaaatgttttaccgcacacaagtccatactcgttgaaaaaactaacaaggcaatttaataaaaggaaatatgatgtaaaacactaaaacctatcttcgcaccattgaaatctttgtcctcagtagaccctgaaaattttgtttcttttatgtcaaccctttccacattagcacctgagtccaaattatcttgcaaccgttccttaatttctggattcgatccactttccaaaaagtctgcaactgcatccgaaaacacctcatcttctgatctaattaatttttctccatttccttcattgcccttctcattgttgcctgtctccaaggattttggacctgacacaaccaaacctaataaaatagcaacgaatcagaaaaaccttttgttttggaatgtagtactaatttcaaagtctatacatgaagaaaagtaattaaaattaatctcactaagtcaagatcagttagatttacttcattttctagtatttctcagcatcaaagttagtaagatttacttcatctcctagtatttctcagtattaaagttaacacactacatataagaaggaaatccacctggtgttttgtgatcatcatcagaaacatgttcatcatctgagccattcaaatggggttgtccctcggaggcagacagtttgtaaccttcaatggttccacagatcttcttgtgagcacgcctgtgcttggcactcggatgtggatttggaaatggccatccacatttgtgacacaaatgaactccatgactctcgtgtccttcaacatcaaatttttcaacaaaaaaaaaaataataagaccataaaaatcttcacctggagaaacttaaaacacttcaaaaagaacacagacacaatttccaaaaccagacaccccagaaagacaaagacttttcataagaaaaacaccgaaccaacaaaacccagaaagagaaataatataataatgaaacatggaaaggaaaagagagagaagaagaagaaaagggagaaaaaaggggatgaggatgagggcagtgaccctttaaagagaaaatgcaaaagaaaaagcacctgcagtgtgagttcttctttgatcctggttatccatcgaaaatgaaagacagtaagaaaatccaacaagtgaaaacccagaggaagaagaagaatggggaggctagaaaaatcaaaactttactggaatggaagcagaacagaagaaggcttggggcgtgtgtgtgtgtgtgtgttagattaagataaacagagaagctgcagagaaagaagagggtaattacagtggaagtggaggagtagtacactactggtttggagcaacagcataaaaaaacaaaaggacccgcacccatgtggacaacgtaagtcactcactgttcatggaaacacgaaacttccgtttccatctccattctccgcttcaaacacttgtacatttgtacgtccaaaagggtatttcggtcttctcacgttcttctcaggggtatacatgtcgttaacgtacaacacttcttagtgtgcacatgcgctgcacgtgcctctccccgtgacgacctttccaccgctgcggatagtggaagggttacatggctgtgacggtggggagaatgacggccaatgaggttggtggttggagtaaaatctttgtgatgtgtagtgtagtgtgtacggtctatccatgtaagcgtccaaagccaaatgagaaagtatgtcccctgcgtacgttgcaactacttctaacagttctattactatttttttgtttgtatctgagaaacgatggttacgctgcaattaggtttcggtctttggtgcatttcatttactatttctcacttatttgtatttattaaaaatttatattcttaattaggcgatgggaggcttttattgtgagctcgtgcaaaattatactaacatggaagactatatatggtacgattatattcacgaaaatagtaaaatttatgttgttatttaggttgtccaaattgagatgtaatttaataaaacatggtataaagtataaactaatgtgtttcatttatttcatttctcttttttttaggatgatttctcttctaagtatataggattaatctaagtgactgtctgacaatttatttatttaatctttcttaattttatttcattttaccagttattaagtatcaaacataacctcctcaaaaaagaagtatcaaatataaccacttaaaaaaaaaaagtaccaattataaccaaagttgtcaccacaatcaatgtaatttctgttttaaattggaataacactattcggcaagagagcacattgatcttaaatggaaaaaacagtaaaaaacagttattcaaaagtcaacgaacatatcagattattataatatttttcagtttactttgtagcagtttgttaaaatcatcgaagataggactagtacttcttaaccaattttctttaagtttcaatgctttttaaacgtacaaaaataattataacagattaaaaataaaaacttctgggacgttgggccatctccaacatatatatgattgttgatgtacgctgggtttggtttcgtctcgctttcgaaccaacagtatatgtatggagtagttcagtttggattcatacacattacacagttcacaaatcattatcatgccactttatctgcagaacttttttaaaatatataaaaaaaacaatattaaataataaatcacgtaataaactgtcattgcaagtttaagatgaattaaattaattttaaaggtcagttcaatatatcttaaaacacattaaaaacaaacaaacttaggtgtactgatcctaaatagaaaatgttagtaataaatagtttattctctttaaggaggcaaaatattggtgcaccaaaagtagtgtaaacttgaagagattccaagttattagaaatggagaaggagatggtcacaataatttggtgagttaagtggcacaatggtggggcccttagcaagtgctgtgttgttggagatcttgtggataaaatcatctttgcccaactggcagatctaagaaattttagttaaggtggttagtgtcggaggagcgtgccttagaagacaataaagaagtattataatcacataacaacaaatattggtattttaattgcgttaaatgatcaaatgataaggagagagaaacctttcacctttgtcctattactaacgagttaaatgagcattgaaaatttaaagaacacactagtgttgttattattattaagtatgatgaaattatgtgttttaaaaaataaaatactctataatgggatgtttttattattaatacttggtgtctctctgtaaattttaaaaaataaaaaatataaataataaaagttaaataatcgtgggtggattacaatatataactatcggtatgggttatttgaaaaatgtaataaaatagatttatgaaggcagttatgataataaaaaaggataaaaaatgtgtataccaaaactttgcattttttatatgtaattataggttatagatgaatatttcaaaataaaaaacaagaaataaattcaaaagaaaacttttaattcataagagatggtagtacacgaaattaagtaagatactgtatcaactttttttgaagtgatattttagttcgtccattgaatacaaaataaatatttatttatataattaaaatttataataatattttttaaaatattgttcatactactactagagaacatatgtaactagaagtgttaaacttaattaatttgcttatccaatccaaaaattgttagggttagtttcttgaacatgccccaacccgattaagaccatataaatctgaaacaagatcattgaccttacctgttattgtaatatatcaaccttattattgtgtataattaaattgtataatgaaaaaataataaaacttaaatatgttatcacgatctcactttcctttaccttcacttcctctctattcaatgcacgcataataactactttatctttcaaccacatttggtgtcgacacatacccaactaattcatctaaaactcatttgacttgttatccgacataatcgacaatataaatggatggattttatgttaaatagtaaatatttaattcactatggttttagatttttaagtttaatccgactctaaccgagtgacgctcaagcttggtctagaatatagaattcttattggcaattgatatatttaccttccctatttagtaattgcactttttttaacatcttatcgttttttttttcttttcaaaagtattccttttctgaaaattaactttttggagagtatttgattattcccacataagccatctacagtctaagacccacgctaacacacacacacacacactcactttgatgtcacgattcacacacattacaacaacgcaaaacttgaaccatatattaggtatcactcttaccgagcacatatggtcatgttaattatggccatgcctagtttgggctgtctggatgctttatggttcgtggtatcggtagagatcatatggtcacacacatggcatttgtgcataacaagaaaagtggaaattgccaattggagttgcaaatcggggttcccatcaagctttcatctcgagttcctcatgggtttcatcactttcatggcacatttattcataacaaggatttgaggaagcatacttgatttattggtgttggattgcgtgtgcattcgtgcgctgcttgcaaatacacctccagaatctactccctcctatattgtttaaggatgctaatttatttttctgtattttttttcctttggggagagtgaaaatttaatttcaatatgtgtagcactggaatttgatggatccccaattcacactttctttttttgggcaaaatggtgttcatatctttcttcctcttgcccctaattttgcttctggaaagtaaattatagaatacgtttttttatggaaagaaatgcttactgattgaaaaaaaggggtgaggggagaaaataagttttaagttcaaagaacaataaaaaatagaggtgcaaaaccagagtttatgattttatataaaagagtatctgtgcaataaaaatataaaaaaagaaggaaatatatttagcaattgtggagatataatagcaattgccattcctatttttcgttttggtctataggaatatagttatagaatccctatacccacacatattatggctgttgttgggttatcaatatagccttagcctgctgctgttctagcccaaaaacattcacaacatacaacaataggggattataaaatccttttttttttttcttctttttaaagcgcacccaatattctttttgttatttttcatttcaataatgtgttcatacatagatttgatttcattatttcgaaatctaaatctcaaagcagtgttaaaaaaattggttcccgtattttaaatttcgaaattgtataaaaaatttaaaaaattcagaatttaatttctagaaatatttattttcgtagttaatttcagaacttaatttttttctacgtttggaaaataagtttatcaaagattttttgttatagaaattaaaatcatactttgagatatttcaagggacagaaaaaaaaaaaaaaaaaaaaaantaattaatattttttgttatagaaattaaaatcatactttgagatatttcaagggacagaaaaaaaaagaaaaaacacgatactttccttgcgaacgaacaaagcgtttgaagattcactagtgactcactcatcatcttctttctctgcaatctacaaagaaaagaaacatgatgaactttgacggcttccagaaggctctggcggagcttcagggtcgctgctccacgctgctgggcaacctgacccgtctccagcccaaccgcgcgaggccgccatgggctcggatagcccagccctggggaggcaggcccatggccatgacggtggaggcaatcgaggagcgcttagagggaattcccgtttacgccctcagcaacgcttccgaggagtttctcttggtctcgggctcttcctccgggaaaaaccttggcctcttctgcttcaacaaggacgacgctgaggctctcctcaaccaggttacgcttatcgacccccacgcgcgccagggctctaaagttgtccccgttgctttgaacaaggtgtttcagctcaaggtgaacggcgttgcgtttagattgatacctgagttctctcaagtaaagaatgccctgcaagtgagtcgtttctttattattactattatcgtatgccaaatgtatagttggatacgctcaaacgatgctctgcgactctgcgtactgttataccgaaatttaaaaccttgcacactcctaaacccttcaaaaatcctaaggggacgtttggtagggaaaaagttttttcatgtccgggaatcatgaatcctgggaatcatgtttactgggaatgaataaaattagtttggttgacattggaaatctttagataagttttggaggaatcgaagagttatctatattttaattatttattatattatataatttaataaagaataatacgatgtttttactgttgtaaaagaaaaattaaacttgggagagtaagattactacctccccatgggaaattttcgattgagaaacattttcaggaaacatcctttcaggaatgttatttttttaaaatacataccaaacatggaaaaccaaaaacttctctcctaccaaacactccctaaatgctaccattagttcctaatatcttaatcaaacctgattattgagattcttttatgattttaatgtgtcatttgaaattaccttggggagaagattgaacagaacatgtgccactgttaatggttgatgtacgatatgattgttagaattggagtaatgaggattcaaatatggaccacttctgtagtgtctcggatatatggcaaagaagcaattgaatgaataatttatgctactggcttttcaaacatggcaacttgaatcatttcactgttcttctttgctttccacctttaacagataaataggccttattcttcactcttcagtgtttgtattaattcgtttagcccaggccccttggtactctcggaattatgattggttctgatatgtgatgttgtctaatggaggaaggtagaagtttctctttgagctagattattttttagtactttgtgtgcaatttatgttgacaaagctttcttgggggaaaaattactgtgtggatagaaagcttcttcacaaatttactatgattttggattggttctcaccaattaccagaattagagcttgactgctctggtgttgtactagtcatttttctattatgttggtctaattagctaatttgataccattttcttaaaattcgtcatgcatagttgatgtgaagtttgaaaatttgcttgtaatccctgtattatctatttaccttgctattggtcattgagctgtacagtaatgataatgtacgctcatgctatacaggagagggaaaaatctggctttgcttccagtggcttttctggtgttcccgttttccaggttcttctcccagctttttaagtctggacattccatttgtgtcttaattcctatgttgcgagctatttgaaaataggggattcaatgaatgtttcacaacattttaatactacataaattttaaggaaaagaagggtgagccaatgtttgaggctcccacccagtgtggtctcagggaggtagatgcatgcaaccttatccccacccaggggagtctgtttttatgctgattatctgtttatagagagaagcagaaaccttgcaaaattggatgaacaatcaaggacatgcatacaaacatatatgtataaataaatatatacaattttagaacaaaaaaaaaaaaagaaaaataaagtgatcttatgtcttagaagtacatcattataataatgaaagtccttgaatttcatagctgtgtaggtaacatagtcttcacttgtgaaacatcattaaacaagtggcactgagtggttgagtgtgaagttctattagcaacgtgcatgctttttgtgtatatagattgtatgtttgattttataattttatttaagagaaaaggggaaagaaccagctcaataaaaagaatgagagtgagagatacactccatagtcttttattctgatgcagttatcaatttaatattagttcataaatgggaattttggtttgtgaatatgatattgataatactccccaatgttgtcaatggcagatggtcattgtggcctatggcactgccataatgggcctcccttcacaaattgcctatggtggttggcaacaaatcctccccaccatggcggccatgaccatttaacaacatggttactccctctgtcccattttgtgtgatgtttaaggttttggcacaagaactaaaaaataccattaatattttaatttcataaaaaatagtgttatttcctaatagattgtcttttatatgaattgcattctctctccttcatacatctcttttattttctcactccataataagtggttaaggatataataggaaacaaatatttaaggattcatagatatattaaaatgccaatcaaaatgggactatttttttttcttaattttgctaaagtgtcaaagaaaatggaaaggagggagtactttggtagcaagaggcccacaattaggaaaatatattgctagttaaagtatttagagagttgttgttagttgggactctgatgctgtaagaggtaggatataaatagtgggagagaatgtaagtggaaggagttagttggttagttagtagtgggtgggagagaccaagctttcgattctttggagattactttaaatttaaaaagccattatcctcattctgggttccattgatccagagtaggaggctgcaggatgctgctcaataaatttgcctttctttcattctgttaatttctacattcagaaccagtatctataatactcatatgataggaacccaaaccccaagcccctcaagttccgaaaacctctacaggtttacagcctaaaccactattctatccatgaattcctaactatagaccatctaaaattcttgtactttactgctactcataaattgctgctagcacatgcctggagtcctgtatctttcaaacctcggattagccactccccattaacaaattcattcctttcttcaaagttcaaacctttgacggaagcattggcgaaggcagagtgggccgacgatggagatgacagcgagggggagcaaatggaatttttccgagaggggtcttggaggatcattttgcttctgaaaatagggtcttctatttcatttttgaactgggtcagcaaacctggcccgaatagcccatcatatttgggtttttttaaacgtgttcaaactgggccacaaaaagccaccttcgggaacggaacagttaacattccaccgttctcgtgagtaaacccgctcttgatgaccgttccgcagtgtctccgatctttcctccaagtttgctcgatggagggtgcaaaacttgtaactcgtacgagtcaacgagtaaactcatgttttttacaacattggacacgaggcacctatacaatacaacatgaaatgagtatcaaactttaaaaattatgggcatataacacaaattaagtatcaagtataaaattaaaacgaaatacacaaatcttgaatcaaaagagagaattggtgttttacagttagcacgagtcattgtaggcataataaaaggctatcatgtttctagtttttgtggcatttccatatgtattggtaaacaatttaaatataaagtaaaaaaaaaaagaagctatttgacacgaatatgtgtctaacacacaggtaaaacttatattttgaagtacctgtgcttccttgtttgccagtttttttaacggatttgttatgtttatgttatgaagaaacttgattgagttgatactgtattagagacactatgaactggacctgttctactgttctacaagtatatttggagcactaattcttataatcttgttatcatttgtgattgcactcatttctattgatgctatgataccttaatttttttcatgtgtgaatcccttaactagtattttgagttgttatattggtaagtttcagtccagaagtctgatattgaagagccaaaataagagatttcgtccacttttcttcagaaaggtattgttgatttgctcgcattgagttacctgagattagatagtcagaaatcaagctgaatttttttaattctcaccttacgaatttttcacaggaggacttggaaaatacacttaaatcggcagcccttgagcagaacaaattaaatcctactatgagaaaaggcgatatccaggtacagaccacaatgattcccttcaatgtatgacctgttgtttcagaggaatcaccatgatttattttccaggttgccactctagaggatgtaataaaagaaatgaaggtgagtgtcaaagttacagtagaagatggaattcacttaaccctttgtgtttgttactcccctttttgagggaagggattttttgcaattatctatattccttaatctaatttgtaaattgagactaaataaaataattttgcaggaaaattctacatcgaactgggatgatgttatttttatacctcctggatttgatgtttcagacgactccaatgagcagtagggcaggatgatgatcaaattcatgacaccttttatgcttatggtattagcttttaatccatagcacatgtcaaacaattatttaggttttgtgcataggacaaacttctgactgcaaactcttctatccttacattgatcatctcacttccaccagcgatgggcataacaaaccatcacatcacgttgacaacaatgaggtaatacagtggaaatggaaaagaactttgattctgaatggattttggttgtcttcaatatgaaacgttattggaaagtttgggttttgcattttctaatttggttttcattatcaagtagattttagcagacttcataatctttattactaatgtacactaactgaattctgaaatatcgtgtaccacttggaggtgcttcacttgatcgtgagattgctattgattgatttggagcggtggtaagatctcaaatggtagttatctctgaccttgtttacgtcacgaaattgttcatcactaacatgtagtttaaatgtggtctcattcatttttctgttcaatttggctatttcgttaacctttcgagtggtctcattttaacttcgaacttatctagagtaacttatgcacaaagcacctttagcacacgataattttttaaccaacatatcatcaactatcaaggaagttcctctatctagtacagttgtcttggctgcaggaaaaagatagcacaccctacaatttcagcaaattataatcttccttgatagcatggacaactttaaattgacaattgccttacaaaatggggtatagtgccgtagtgaggggtacaagtcaaagaaaaacaggctgatatccaatccaaaaggcatagattggttggtcctccatttatggatgataaatattaatttttttcttttttggtttcctgatgaatgatgattgctgttgctcacagaaaaatcaatttcaagacacgttgtattcataaagagatggcacaaatttgttccctttctcgtttactcgttgctttactggagtttgggaggaaaagaaatggaaaagagaaatagacaacagatatcaaattctcacttattgtttaagaaggggcgtatgaataaggagattttttttgtcgtaggatctaaaaaaaaaattcaccccctccccccaaattggcatgaaggaaggatctcactttcctgtcgtattttcttaaaaaactaaatatttttttataacaaaagattaaaaaatatcaatatataattttatgttaagaaaaaataatagttaaaaattaatttttagattaaatttagtttttaattacaaattatttttatataattatttatttttctctttcactcttccaaacaagtgaagagaaatttctttacttctttctttactatttttatttattcaaaaaacatttttattctatttctcttttatttttattcttttctatttctttctttcttgtctatttcatttctaattgaaacaaagtattaggctgatagttacctccatttattcactaatcatctaatatattcatgtacaaatttatccgcccaattataagaataaaacatgatggtttggatgatggataaaccatctatcgtattttataaaccaataatttaaannnnnnnnnnnnnnnnnnnnnnnnnnnnnnnnnnnnnnnnnnnnnnnnnnnnnnnnnnnnnnnnnnnnnnnnnnnnnnnnnnnnnnnnnnnnnnnnnnnnnnnnnnnnnnnnnnnnnnnnnnnnnnnnnnnnnnttactatttttatttattcaaaaaacatttttattctatttctcttttatttttattcttttatattatttctttcttgtctatttcatttctaattgaaacaaagtattagggcgatagttacctccatttattcactaatcatctaatatattcatgtacaaatttatcctcccaattataagaataaaacatgatggtttggatgagttataccaacatattggatggataaaccatctatcgtattttataaaccaataatttaaactattggatcaatgatgatcacaataagagcatatgctcatagtaggttctcaaatagtactcacaaggagagaagttttgttgacaaataaaaaaataattttaaatggataattagatatccatctgtgaaaattattggcaaataaattagatgttttcttttaaatgattaatgtatttttaatgaattaactattaatttgaatttattttccacacgttattcatgtaatattttttaacactgttaatcaacaagaaataatctcaaatatgactatttaaataactagtataaagcttaacaaaactatcaaacaacgatttataattaaatgacacattatactattaatacattttaaattttaaataattttttaaatctattaattttaatccaactcaaaattatccaaaccattcattttacccgaaatcattgaaatcacgcgtttgatatgataagagttggtgagtccccatcccaaaggaatatctcaattctcaaaccccaaaaatatgaatccttatatttagaaagcattttttcatatataggacccacctcaacaatgcacaatgtgacgttgcgcttccttaattgatggattttcatttggttttcggtgcactctcctgtgttgtgtagaggtctctttctattcaattgcccatcgattcagacttggaaaccaaacaaaaatttgttcatcaattactaatataattataacatgcatgcatgtacccagaaataataataacaattaacatgcatgcatggatcatggattttgattttttatttgagcattcaacttcttatttcgtactttccaatattactgtatgcgctgtacataccagcattttttaaaaatgtttttacgtctgtcgaaattattttgctttatatttctgtcttttagtttgtgcttgattttgattcactataaaataaattaatttcaacacctattcagtgtacacttatgttaatttattttaaagatttttccccctacaatttcttaagttaaaaaaaatgtcaattatttcttcaaacatgcacttatagtgtgtttgtacatctcttagaagttagaatcgattttaacctctaaaatcatgatgaaaaatttaaaaagttgaagtaattgtttgttgctttggacttcaacttaactttagtagaattgaaacttaatctaaacacattgagctagaatcttaatattcagattaattcattttacaaagaaaaaaaagcttgtaatagaagttttttttttttttgtttccttttacaagaccacgggtcaacaagagaaaattttactcgacatagagtatttaacatagttatgtgctctaaaattaaattagaaaaaagtttataccaattgattcatgcattcggtaattataatttttcctaatattagtaaaaaaacatacacgttaaactttgtttatgctaaataagacggtgttgcaaaggtcttagattctactaacttctacttgagaaaagaagagtttgtgttgaaataaaagatccaataaacatttctcttgatgagttgttgtttttttttttacgggagttgttttaattcttctaaattaaaaaaaaatgagttttattaatcaccaaatcaaagagacaaaagaaaagaaacaaagtttgagcctcctgcaacccaatatatatctaaacaagtatcacatagcctcgcatagcaaaatccgctgcattgaaaccaaaacataaacttatcaaaccaagatttgctagattcacgagaacagaagctgaattctagatttgttttctttttcatcttttaaccagaatagaagctgaatttcaaaatatctccttttcttttttacatgcacggtttatttaaatgaatatgggtatgcctcgttattgatttttagaatttttttttttaaactaaaatataaaaaaatatgtttgcatgtttatttnnnnnnnnnnnnnnnnnnnnnnnnnnnnnnnnnnnnnnnnnnnnnnnnnnnnnnnnnnnnnnnnnnnnttattattttaaaatttattctccataacttaattttagattaaaaattaaaatactttttacttgttttttgttctcttgttttcatgaatggtctcatctcatctcaatttttagctttttccttggaccttcaagttatatctcatttagtatatatttggtttaatttattatgaaaaaataatcatttacttttataaatttcttgagagagatgttaagaaatgattatttattaaattcaattactaagtatgcatttactatctaaaaattgttccactttacaaactaaacaaaatnnnnnnnnnnnnnnnnnnnnnnnnnnnnnnnnnnnnnnnnnnnnnnnnnnnnnnnnnnnnnnnnnnnnnnnnnnnnnnnnnnnnnnnnnnnnnnnnnnnnnnnnnnnnnnnnnnnnnnnnnnnnnnnnnnnnnnnnnnnnnnnnnnnnnnnnnnnnnnnnnnnnnnnnnnnnnnnnnnnnnnnnnnnnnnnnnnnnnnnnnnnnnnnnnnnnnnnnnnnnnnnnnnnnnnnnnnnnnnnnnnnnnnnnnnnnnnnnnnnnnnnnnngtttacttctgttgacactagttagtttatatattattaatcattaaaaaaaaaagaaatgaaatataaaattgttaaaaatattattataaataacaaaaacatactattatagcttctaaaatcaaagttggaaaacgaatcacgtttattctatatcttatattataaatttaaatcttcttcgtggaacaacttatatatctatgccctttctcgttttgttacacacatcttataagctttggttttaaatcaaatcaatatttgtctccttaaattattatctatttaaaagagaccttttaattttcacagttattttttccaatacttaatttttttacaagaatacttaaatttattcaattaacattaagcataatatatataattcttataaatgatcatttaagtactattttattaattgattaatttttaatattttaactataaattttttaatgtgtatattttatatcttaatatatatttttaattatcatttaaataatttttctttaatttttctaaatctgtagttttcttttcgtatttttgtgtatcatgcaatacgagaaatatttgttagttttctccaaaatttatttatttgaaacaaatttgatatatatcccattcttgtatgcaaatacttgattagtataatatgaatgcgggttaatttgacgagccaacttaactaaggggagaaaaacgggacatagctagatacagatactcggtcattaattagatatactcatggataactcaggaatgtgtgtaaaaaagttctaaattaagtaattcgtgcataaagaatatgcaagtttttatatcttcaatttttgtacgtatacttgtttagtaccatttttctaaattaactgatgcttcatttggtataaaacaatgaatatagaacctgcttccagagattccaaattccatttccacccatttctggtttttaaacaatcaactgaccctgtctgccagcgcaacctgcagtcatatgggaaactaccattcaaaccatttttcattatggtgagactgttagctcaaatttcaaatacagcaacagtagttgcttttggtttggtttgtagatcacggattcacggataaaagttgaaactatggctcaatttgtttatctggaatcaatgtccccccttcttcaaagagaatattgtggttactaattaaatattattatgatacgtccatgatatttaattccacaattattgtcactaattagtggcgtataccaaatttaatcttcaccaaaagcatatgctataaaagattgttagaaggaacctcatcattgagctatggggatgaaatcacactttttttatgatctttcctttgcttttcatgaaggctgccatttgatgaggaataagtagttttaattaattaatggacctatatatcatatatgtgacaatatctcaaccatcaatatcatcgtgaccaaccaatttagttgaattcagcaatttcactgtctataaattctatagtcacattcatctcgttgttttactcttttgtttcatttgaactttccaagtaacttgcagcacctatgattccatgtattggctttcccaaatctactttatatgtagactcatattcaaccaaacaaaggttttatttaaaaggacgcaaaacataaattgccgaaagcatcaatcatatgcattatgcagtcgatttgtataattgtactgatatgtttattattttgttagcaaaagaaaacatgctttctgttttgattagatagaatttagaaagaagtgaaggacactaattaaatttccccaactatatgtattcacattaaaatcaggtccattctgaggtgctatatacattctcacattcattaaaatagtagtggagtactttttaaataaggcatcatcattttagttactttttgcaaggaaagggtggagattctgatagctggttgccataagttgattcccactgaccatatatctccttataagttataaccaataaatttgcacttttattccaataactagttagtggtgattaattaacattagagggatgcaaggctacacttcaatgatgattggcactaatgaatagtttttaagtatccaaatactccaactcttgatcttttttttttttttcagtctccaactcttgatctagtttctgcatttcctgaataataataataactataatttgtaacgcttattagtactttagtaatgaagcgatcattcattgccatactcttcgttactgtgccattatggatgcccttaccctcatttcaaggttgattctgtagaacttccttattaaatgctcggaccatttatcaggaaaaaaatctgtggttattgtaacaatgaagggtggatgcaggtaggaagtttgttcattcactaatattttttctaataaataatttgtcatacaagtagatattaatataattgtatatgcaccgtactcgtgagaaataaatgcatattggtttgaattatttttttatttgttttgtcattcacatccaaagttgttgtctgcattggaaaagacaaactaaaactcaagcaatgcaacaacccgaaacaaagcaagcagaaagagttatcagcatggccgaagtggataaccatgccatatcattggcaatcttgtgactattttttttgaattttaactccaacatcaaagaatatgtatatctatatgtcacaaacttgaagattatttaacagtgaaaatttaggtgttggtttaggcaatatcctaggggcaataactcagtacaactccgccacatggcaccatctaagtggatgcataattgatgattgatggtactaagaagtggtaaaataccctcatgtctttattctgcttccacatcacacccagttggcatccatccatcacctaattttctctctttttatgaaagaaagggaaattttgttccaaatcatacaaaaatggggtccacccctatatttccgggattaaatccttttttattatttatttttcatttgtgagtaatatcatggaaacaatcattgcccatactgaataatactagcatcctgtgcacaaacccaaaaaccataactcaaaatctattgaagtataaccaatggccaaacaaaaaggcaccagctttcaaaacttgctaagctggcaccagcttttggtcccaccagccccagttattgctccttcacgcgtcccaccatagtctcatacccaaatccccacctccatatatatatatatatacccctcttttgaacacactccctcacatcacaagaagcacaatttctctcctttttttgtgtccaaaatggctactatttctactcacaatattcgattctatgttattatgctagttgggataatggttagcactatggttgctacctgtgctggtagcttctaccaagactttgatctaacatggggtggtgaccgtgctaagatattcagtggtggccagcttctatctctttcccttgacaaagtctctggctctggcttcaaatcaaagaaagaatacctatttgggaggattgatatgcagctcaagctcgttgctggcaactctgctggcactgtcactgcttactacgtatgctcattaatatttgcaatacattatttaatttcattactacaatattttatactacaaagtacaaacaaaaatttcaaacacaatttaaatatgatttcttttgatacttttagtgttatttttcaatcaaaattacagttttacctggataatttgggtaatataggtttgtaataaatgtcaacagacagattagattattgaagtaaaactctgattctgatcacagaataatacttttagtgtatttaaattttgtccatatttcaatatattttctattttttccaaattaaaaaattgtattgtgctattatcatgtttcttatcttctttttttttggtatactcatttacccttgcttttaccataagaaaaatatactaattcaaattattagtttctttccttcttcatgagctaatacagtgatactgtagacttttttgtatgtgtgtatatgttttttcttcttcttcttttaggttgctttagaattgattcttcatgaaagaacatgataaaatcctgtcttcaaatacgactactattgaccgcttcttcacttaagacatcaacctttgtcaaactcaactgtacattcacgagaatgctattgtagcaaacccacaaaaacaagttagactacagaattttactttgtcaacaactaatgctttatttattcactccatgctgctttctgtttcaaacattgacgtatacattaatcaacttggtcgtttttaagcagtgaatttaactagcgctcgtgacaggggaaggtggctaactttgacctagtccaaaacattactaacttttaatattgaaaacttcggttcatagcataaactaatgacaaattaaaaaaaaaaaaggctcgtgtaatattaatgaactacttttatcataatgtactttctggttttgaattgataaaaaaaataaaaaatctaaggctttttttagttgataaactcatactattcctatgcatgcacacaatttaaattcctgttaataaacaacaaacatcacaattccccaaaatgaggtccttttctttgtcgagttgtttgtgctgctaccacacacaaaggccatatcaataactatagtaattccattttctgcggtgcagttgtcatcccaagggccaacacatgatgagattgatttcgagtttttgggaaacctaagtggggacccttatattctccacacaaacatcttcacccaaggcaaaggtaacagggagcaacagttctatctctggttcgaccccaccagaaacttccacacttattctatcatttggaagccccagcacatcatgtaagtgataataaacaaatattcaaaatacaattttttgtttattaataaatagtctatcaactaatattgcaatcaaccataatcattatatatgttaagttcattgactttgacatcaattatctttgaactagaagtcataccatttgaaagtgtaaattgttttcactgaaattgcatagaaatataactttgtttatctctatgctaagttttcaccaaaatccattaaccaaatcatgaattgggttaactgcagattcttggttgataacacaccaataagggtattcaagaatgctgaatctcttggtgttccttttccaaagaaccagcccatgagaatctattctagcctctggaatgctgatgactgggccaccagaggaggattggtgaaaactgattggtccaaagcaccctttacagcatactaccgcaatttcaaagccactgagttctcatccaggtcttccatttcaaattctggtgctgaatatgaggcaaatgagcttgatgcttatagcagaagaagactgagatgggttcagaagtacttcatgatctataactactgcagtgatctcaagcgattcccacaaggtcttcctgctgaatgtagacgctgaaggttccaagagatgaagagaatggccactttcttattggattagaatcgtctatgtaaaatatgctatgtttattatgtcttagattctttattgacttctgtctttttttttcttcctttgttttttttagtttctattttatagttgctaatgtatatgtatattaaggggtcataataataaatcatattctttgtaccactttaattttcttgtcaatatgggcagttagtctcatcctagctcgtccaccctgtgaaattgatcatgttggaatcaatttctatctgttcatataataaaaaggtgtagtcaagtttaatagcactgtagttctggtactgatcgacgtcactttgctcgtatggaatgttaataattaataatcaactgtcagaaataccacattgacataaaaaatcgtagaccctgggcattcaaaattagtaagatggctgcaggaaataagattaaacgagaggattcaaaatggggcattcaaatttaagcacataaaaacattaacatttgggataaaaattattctgtgcattattggtaagagatctaaagagaatatggaaattaaatgggtggcctgaataatttagagtaatttcattcgtacattatatatatatatatatagatattcttttttttgaaagtaagatatctcataaagtcataaaactaattttcgatatatgaaaattattaaattgaattttgtctttccaaataatttttttttgatatgcaagatatatgagaaattgaatttctcttaatatatttaaataactccatcattgtcaactagacagnnnnnnnnnnatatatatatatatatatatatatatatatatatatatatatatatatatatatattctcttcccaagcatgtatacatttcatcaattaaataatgtattaataagatggacccaaagagaatttttccctcaaatgagattttgaaccatcctctactatcagctatcccactttccaccattgatgatcctctatggtatctctctttccaatttttctccaaaaatttctagacaatgtagacatacatttacgtttaacgattacgataaaattaaattaataaagtaataaattggttaatataatatatttttttactgctggttaatataattttatgatccgtcaatcacatatttaagattgatgaatataattttaaaattgtatggcgagaagtacttgatagaatccaaattgaaacaaaacatcaatattctgcatgctcaaaaggtttcatatattttatattaacatgcagagcgcccaatatcgttggacaaaaaagaacaaacaaataaataaataaagagagagaaaataaccttaatcgtagggtaagacaaatgcatgcagacatattacatgagaaattatgtgaaatctctttctttcgagtcaacattaaaggagtttaattatttaagccacttaaatcaggggtgaatagcttcttaattaatattatcgaaaaagataaagagaaaaataaaatttctacttgtataacttttataaaaaaaattactgcatatgatttttacaataaaaagagacaaaaagggggaaaagcataaaataaaatnnnnnnnnnnattaaagtaattaaaagaaataaaataataatattattgaaaatatactgtattatctaaatgttactcccctaattttgaatataaaaaaattgtccacaatataaataaattttaattaattttactctatttaatgaaatgatccttcaaacatctttttcatttaatgatattgtatttctaatgacccttttatatcaaatttcaataaaggacagtttagaaaaaatattattttttaaatataattaataaaaataaataatattaacatattttctcaattaacgtaaattaatttttgattactattcaaaaccggaagaaagtatataaataacatagctgaaaaaaaaagaagcatttatcttccggaaaagtgatccatcataccttgactgagcaaatgttatccccttggccaaacataatcagactaacaattttgtttgtatcgacaattattgtgccaatgattgtacttagagatccctcttcttgaagagagagagagagagagaatcagacccctaaaaatatcttaaatgcaataaaagtgattgttggttatacgaggaattcattattttaggtgcgtttaagagaaaatataaataagaaaaacaaaacgaagataaattatatatgcgaaaaatataataaatttagggtatttagttttctatctcctcttttttcactttctacttttttatatttttcttttatttacggtggtaggaattaaagaatctataaaagacagttaagtcttttttttttacgtaagaagaatgaataatcatnnnnnnnnnnaataaaagtgattgttggttatacgaggaattcattattttaggtgcgtttaagagaaaataaaaataagaaaaagaaaacgaagataaattatatatgcgagaaatataataaatttagggtatttagttttctatctcttctcttttttcactttctacttttttatatttttcttttatctacggtggtaggaattaaaaaatctataaaagacagtaagtcttttttttacgtaagaagaatgaataatcattagatcttatgaatggttaatattaaaaataccaaaatccaacatcaaatttcacatttgtccaagctagtgtcatatgttgtgcattttattctctatttaaggttgtgtttattttgaaggatgaaaataaaataaaaaaggatttttgtacttttttatgtgaaatttacattttttatattctattttaattcaaaaatttatcttctatttatataatctctatttctattttctaaatcaaacacaccttaaatttatgagtatcaaaatattcactctaagaagcttacttcaaaactcaagtaacttgaaatccttgttttttcacatctgcaatcattccaacaattttatagttattcatatttttgtaatggcatgcaatggtgtggtattcttctattattttttaaaagaaattattagtatttaatcacacgtatttaacaaaaaatttcatatttaatttctactatgtgaaaattttttaagctagatgaaattaatctttaatatagtggaatgaagatactaatgacatgaccaaaaaaagtattactttttaaaaaatgagatcaaataaaaaaaattatttaacttaaaaaaatagggcaaattagaatgaatcataactgcgaacaaaaggcatttacaataacataaattacaaaaaaaaaaaaaaaaatctctaaggttcttgtcnnnnnnnnnnnnnnnnnnnnnnctgtttcaaaaggacgaacatatttctctgatatttagttttccaagactaaacctgatttataatttatatttgatatcactcctaaaaaaaattccaagatgagaggataaatgctttaagaccgcaattacagaattatccgcctggttgaatgactttttcttcaacatgaaccgcaaacgtaaccgttggtggccgcaagctctgcaccaacaacttgaaataaaacagttgttcaaatgaaggaaccaattattggtgtataacaaccatgcacataccgttattctgcaatgagtattaagatcatcgtgcatctgactaagacggtcctttgcaacttcttctgctgcacatgctttcctgcaagcttctttcacctgaaacatacaaggggtaaaaagcctcagtttggtaagcattttgcctattatttttacgctaattgattgcgattttgcctatacagacacgaaaaaaggatggaattacaagttcaacggtaaactagattaagtccaaaaaagtttatgaaacggacaaggaaaaaaacaattaaataatagtgagaatgaagatatattttcatagctcaaatgtatttaaaaagaaagctactgagtgatgctgtcaatacaatgtgccctcaagatagaacatggccaaaattaactgaccaacaatctttcttcttaagcccaaagcagaatattatatacttgtgaagaatgaatactttcatgttcaatttttagtttcctgtgattttatcatgtgaaaaacttgtatatatttcccttttgatcgattcccaacaaatcttgatacactaatttaatatctattaagacttaaaagagatagacacaattttcagtcataaaattcacgtgtcaaactgaaagggcatcaaaagcttgacaaaataacaagttttgctaggtgataaaataatgatccagtgaccagatggagaaaaaaaacggaacagaggtaatgcaacacatgtcaaactctacctaacacattagagagactaactacaaatcaaggtagtactcacctggcttccatcaaaaacaggattgttgttgacattatcagcagaactttctaacatatttcttagatgaaatagttccttcataagattataggcaacctcttcggcatctaacagttgatttttagaaaattcaaatgctctttctgcgtgaaggcgaaaagaaacacagttcaaacatgtgcaaacccctctgcaccctcttgggtttctttttaaaattccttttttcaaagcaacggcagggactctaggttgctctacaacttgcagttgagacaagctctgacaatattcgtgtgtttctggtagcttctcattagaaggcatcaggaaagaattatttccttttacttcagagtaaactgataatgacatggacgaggtaggtgaagccttttcttctctgttggtaactttgttaatcataggcgccaaggttgtgattggtaagtctattccgtgaacagaaattgatgtatcagtgtagctctctggcttgcatagtccatttaatacaacctgttcattttgcagtagaatcactttgcatgaatcatgagatgactggtattcaggaatttgagatttggggcttgaactatcattgtttaaatcacaagcctgcaaccctgtttgttgctgaggaccagaattgccagcacaatgttccataggaacacagccatttgaatcatttacaggagttagttgtaagtttgaagttgaaattggcagaagaggtgtttgatccatggattccgcaagttttgggtaatgatcatttactgaagcacctagaagtattaaaggtttagtttagaactacagctgccgtgaccaagaaaaaaattgaaagatactaaactaaacaagtatcttccacaagaataagaaccaatacttacaagaatcatcgttcatggtattcaatagaaatggaagcaatctcttgtagtttaaagatccagcctgtttcaacaatttaagctgcggacagcgtttgagaacctgtttcaaaatcacataatcaaacatatttcagataaatacatgacagggacaaaaaaattaagtatcagttaaatcaatgagagtggcaagtagaatcataatgttgttcgttaatgcaagttttatggaaatataatttagcactagataaatttagggtcctcaccgacgtcatcttggattcagagccattttcgatttcactagcattttggttattactaccttttgaaggccttcttgaacataaaactatgccattctgcacagttccagctttgtcaccactatcccctgccatgtcagatttttctgaggtaatattctcagatggagctctaaatatatcatttgaaacccggacatgatttaaacttgttacattctcctcagcatctagcacattgggatccgattgacttaggctatgtttgggagttaggaggggaggggaaggaaagagattcaaggggaagggaggggaaggaaaggaaggaaaatgagggaagttccttcctccttgtttgggagttaaaaatttatgaagggaggaaaattgagagttaatgagatacttttatataattaattttaatagtaattttaaagtgtatgataaataaattttaattagcatcaaactcaccaataattattcatcacaaaacattgatgggtagaatagtaattttaattaattttccttctaaaaaccccccaaatagggggaactataatttctaagcattggagggttttggaggagttttaaaaatccccaaatcctttccctcaaaaattataactcacaaacaaggagattactccagctaaacccttcctttccctcccctcccctcctaactccctctcccaaacatagccttagggtctgacattcagggggaaatctgctgacagattcatgctcctccagattcacaaactgcttgctttcatcataagcaatagtgaatcctttttctttacttgaatgatgcacatatgtaagctcagagacatcaccgttgatatggagcatattttgatctttgggtggtgactcattattgtgttgtctggatatcttattctgtacttccttgacgccatcattatgcacaacattcttagcagagtgaaaatcatccaccattactgaacatggattaagctctgatgcactcaagcattcatctttagaagcaatcgcaaagttttctgtatgttcactgacagagggtgcagataaatccccacaaaccacttcttttgcgtccaattgtgttgacaattcaggcaagtcttgggaaggtgtcaattttggctggttgccatgagatatctcattagaaggattaactaatacatagttttccaaaccattagattcaactgtgccatgcatgggactgctgtttgtcttatgttcgtctatagaagcttcttcactttgagatgacaaagggagttgggagctctttgcatgcatatttgcctcatcttgatgatcaaatttggatgcatctgtaaaatcaactagctacttcatatccgcataaaacatctaatgaaatttgtattattaaagtggttgaatacacaaggatagttaccagagtcatctttggtaagatccattagaaatggaagcaaccttttatagctgatagaacctggggttttaaaaagtttccggtgcaaatgttgtctaggcacctgcgtggacatcccaaatcatacttaaattgcaactaaatgtaaaaccatattgttaatattaccaaaaaatcagacacatgaaatgctagaaagccgactaactactacatcaaaagttttttcttggaatataatatcataaaatatttcatcacttatggttttgagacctaattttattatgtaactaagttataattatagtttagcaaagatcagtaactaaatgtctaacccataaattggtagcaaacaagattagaaacaaggacagattcttacggatttactcttgagagaatatttccccttgtcaactttcagacaagacacttcaccagcattttcctgagtgtctctggtaaaatctatcggtttgacaatgacctctgaattaacacatatatcagcatcaggaggagttgtctgtatatattcttcattcaagacaccaaactcctgtgccgtactagcctcagcacgatcaagattattcccgtagctagacaattgcttcaagtcatcattgtgcaaatcacttgcaacacctttaacaccataatctgcggtggcatccgtcttaagttcttgtttagactcttcttgactttgagatgacaaaagaagttggaatccctgtctaccctcctcatctttctgacaaaaacccaattttggtgtacctacaagatattatcagaccaattagctcattcatcacacatacccaactaaatcatcaaccaatgaagtaaataaaaaataaggggtttgccgcacaaaataattaccagaatcatctctcacggtatcctttagaaacggaaacaaccttctgtaattgactgaacccggggccttgaacaactttccctggaaacgtggtctgagaacctgcaaacagatcccaatcaactctacaataataaaaccatgttctcaaagctacaataatatttaaaaacaagtgttattcactggaattttaacctagagcacccacaataactcatgtaacctaattacataattcgccataattaaggttggatctaacaactaaggatagaaggcctaatcaataaacataaagaaacctcttaagggtgtggtcagggcttcaatctccaggtacatgtgtatgaaattcacccaaaaaatgcataaataaataaccataaagaaaataaattaaaaaacatgtgagacccttacagatttgctcttgagagaagaaacattcccagtagaaggggtatctttgacaggaacctctgcgtccagtttccctacatcttcgttaaccttggaatttgaaccaccgcaaatctcagagtcgggtagagtcattgctccatccaaaccatcaattttctccgaacaatctccaccgttctttccctcgcaatctttctccgaacaatctccaccgaagccccgagcctcacaaaaaagccccaaatcgggactctcggttgcttcggcgcttcccttgggaaacgtgctttcgatcaaactggggtttgtagattgcggaggggaataaactcgcctagctcgaaggtccttggtcagagggcgaggaagctccttgtcgtcgcgcttcggtttcttgcaattgattcggcgaaagccaaggagttcggcgcagggttcgtcctgtgcgggaacaggatcgaagcggagttgaccggagcggttccggtgatgatagagctgtgatctggtgcgggtcagtgttccagaagggtggttccgcttacgggagcttgggacggtgtccatggtctttgcgcgctagagttggatacgcgaaatttggcgcaatggttggatatgagagacatttcatggcgggaataaaggattccttttggcggggattttagtctcctttagaattataatcttttgtctttattttttttttcgacttcattgtttattataccctatttcttatcaattgtttttcagaatagttaagaaaataataaacaataagaaagtactttttcatataactaaaatttataatagataaataaattaatataaaattatattataaatacatatttaaaatatattttatatttataataaaaaattatattatgatattattttagtaaaacattgtagtttgatttataattaaaggtgacaaacatataatgatcaaattaagaagtaaaagacttgacctctcgttctctccttccctctttttttttttttnnnnnnnnnnnnnnnnnnnnnnnnnnnnnnnnnnnnnnnnnnnnnnnntacaaggccatgtttgaaatttaaatgttatgattttataggtttcctcaaaattgtaagaccatttttgagatttaaatgttatgatttcataggtttccttaaaactgtaagactatgtttgaaattaaaatgttataatttcatagttttttcaaaatcgtaagattatgtttgacaaactgattgacaagataactgaaaatttgtaagttataagttaaaagttgaaaagttaattaaaaatttataagttgacttatttaattgaaaatgttctgtaaaactaacggataaattaacaaataaatatcaaaaatgacatatttaataaatgtcnnnnnnnnnnaattctccttcatttatttcaaaattcaacaaacttgtcacacctataaagtaaaaaagcatgagcaaggatgcttgagttcaaaggaacaatatccaccttttaaaagtcctcatttgcagctatttgagataaattcatatataaattataaatgaagagttttttttaaagaaaaaaactgacctagatagttattttatgacacaaattggcaatggtttttgtgattaggatgttcgaaatttaaatgttatgatttcatagatttcctcgaaactataaggctatatttgaaatttaaatgctatgatttaatagatttcctcnnnnnnnnnnnnnnnnnaaataaattgcattgatataataattttgaatattatgcttaccattttttcaaccactactattaatcactcaatgattactagtaatgcatttgagaataataaaaatattttaataaaattgtttcaataaataatatatttattgttgttcttaatctgatgtaaaagaattcattaaaaaattgtgtaaaagaaattcaaacataaaattatatatatggtaataactattttttcaataatgtttttatatatattgtttattgaattttacatataatagtttaaagattttaatttttaaccactaacaaacatgtgtcggctgtgaagggaattttttctcagaaaatctatcctttcaactactcctattgactaaaatgtaggataagggatgaagatagattgaggaagtccgctacgtattcgtcacctcaaaggtcacaaatgacaaactatgacaagtcgtagtctatgattaattgattatcagtatatatacattcagttttttcttatcacttcagttctcactaccttttcttcttcttccacccaccgcagtagttttctcctttgtctattccgaacataaaatcaatcatttcaaatcattaagctgcaattacaatatcacgcaccatgttccgccaccgcttcctcatcgtgatgtacccagcacaaggccacataaaccctgcattccagttcgcaaagcgtctcgttagtttgggcgcacaggtcactgtttccaccaccgtccacatgcaccgtcgcatcaccaacaaacccaccctccctgacctctcctttctccctttctccgacggctacgacgacggttacacctccaccgattacgccctgcacgcctccgagttcaagcgtcgcggctccgaattcgtcaccaatctcatcgccttcaacgcgcaagagggtcatcctttcacttgtttagtccacaccgtgctccttccttgggcagctcaggcagcgcgcgggtttcacctcccgacggcgttgctgtggactcaaccagccaccatactcgacatattctatttctactttcatgaacacggtgactacatcaaaggcaaaatcaaagacccctcgagttccattgaactgccaggattgccgttattgcttgcaccacgggacctaccttcatttctattgggttcaaaccctactattgactctctcgcggtttcaatgtttgaagagcagcttcatgatcttgacgtgcaagcaaagcccagaatacttgtcaacacctttgaagcgttggaacatgaggctttgagggccgttgataagttcaacatgatccccatcgggccgttgattccctcggccttcttggacgggaaagatcccactgatacttcatttggcggtgacatattccgcgtctctgatggatgcagcgaatggttggactcgaaggcagagatgtcggtggtttatgtctcgtttggtagtttttgcgtgttgcccaagaagcaaatggaagaacttgcacgtgcgttattagattgtggaagtcctttcttgtgggtcattagagaaaaagaaaataagtcactagttgaaggaaaagaagaggagctaagctgcagagaggagttggaacagaagggaaagatagtaaattggtgttctcaagtggaagttcttcaacatcgttctgtggggtgttttgtgacgcactgtggttggaattcgacaatggaaagcttggcttcgggggttcctatgcttgcatttcctcagtgggtggaacagaagactaacgcgaagctaatagaagatgtgtggaagacgggggtgagagtggataaacaggtgaacgaggaagggatagtagaaagggaagaaattatcaagcgtttggaagtggcgatggggagtggaaagaaaggagaagaattgagaaacaatgcgaaaagttggaagggtttggccagggaagctgtcaagcaagatggcggctcttcggataagaatctaagggcttttctggatcatgtttgcccacaataaatgcatatatagcttcatcgtatctgaatttttctatcctttctcatttaatttaaagaacaatacttgtgaaataaaaaagttaaatacactataataataaatataaataaattgtaatatatatatttgttactattcgagatgtttaccttgctattcagttgccttttgttttatactacctcctctgtttctaattataaaaccttgttgattaatttatacatttaaagaaagtttgttaaacttaggtattagcgttaattttttttatataaatataacattttttaaatttatttcttaatattaatattattgaaattctatttatcttctcctatctttataaaaatgagaaaaaagacaattcaaatcaacatttaattatgtaataaaatgaattagaatattttagtaaaaaaaaattaatgtacaataaaattaagatagagttttagagcatctttaataatagattttaaattgagattttaatctaagattaaagatctctcaatatttctcctattttttttctagtattagatctcaattaggaaaaaaaaagaaaaagaaaaaatattatctttttaatattatacatatcttaagaattcttctataataatttataaaaagtatatatttttattataaatagagatagaagtgatatactaatatatagcttggttatatttatgaatatgttgggtttattttgttattgttctaaatagtccctgttactggtccacaataaaggcccaaaagcattagccagagatatgatcaggcgtcactttgggactttcacagcatgcaaagtacacccctcccttctctttcttttatttgttaaaatatagttttgaaatttactttccagatttaaaaactatgttttttaaatacactctcttctaataattaaaatttaatagaaatcacaaatttgaatttatctccacatttaatgtgtctctcttcatctcatatgatctttgttctttttaattatttgtctttaaaagtttttatgtagaaactaagaaacataataatttctcttcatccttaaatataagacttttataattaattcataattattaagaaaatttattaatttagttaataccattagatttatttgtaactctaatatttttcaaaattgttcctaaaattattgggactaactaaattattttgcacgagaagagaataatagtagttgaattttaattttaaaaattaaattcctcaattatctaatcttcacaagatagagaaaaagacaattcatagcaattactattatttatagactataataattagggatatttttgtataaaaaatttaaataatattcttatatttagggacaaagacagaagttataggtttcctatttcaccctttatcattattactccataatccataatacatgtatgtatgtaaattaattgaagatcagataaaaaaataagaatataattgaaaaaaaataattagttatcttgaaatttgtaaatgataaataaaaaacatttattaaaaaaaattcgatactaaacaaaaatgaaaataatctttaataagtttcaactaataattaaatataaattaaagaatttgttgcttaccctccacttagcagtatttttgtaagattttatatatatataaaaaaaaaaaaaaaaacttaggagagtgcaattagaataaagggattggaaaaaggccctcctaaaagtatacgacagccgaagcggaaattgagatacagagtttggactgtaattagaattgcggatcttgtcgctcgttttattttattttaaaataaagaagtgctcgcatgacaactgcaattcaaagctgcatatctttcgtagattatgggccagtctgaaaaaataacttaattaatatcttattcgataagagcttatgttacaaatgcttaacatttaataagttgttgctatttggatattcatgttgaaaagtgctttcataattttatagtatttggatatacattcttgtataagaacttataaaatgtttcattttacaattttaaaaaaaattaagaatcaaactaaaaataacatttaaaagtaactaaaaaaataaaaaaataacgttgtataccatacaaatattaaaaatataaaatcactaaattattatttacctatttttatagtaaaaacaaaaaaataagaataataaatctaaaagaaaggaatatcttttgaatcatgaaattagctgaataaattaaaacattttcttgagattataaaatgcttgtaaaaagtatcaatttgtttttttgatagtcttatagacttgatctatcacacgagtagatgtgttaattaatttggaagaattcaatatatattcatctctaggattgtttggttgaagagaaaaaatattatttaagaataaattattaaaaaataacgtatgtctcacatttctttttctctattttaattcatatatttactctcaattttatttattttttctcttacacataaccaaacaacccctgtgtgaatgtttttggctagggaaagaaagccaacaaaattttagataaagccagaaaaatgaaaagctgaaagaataaaaatgttatanaagaatttggaacactcaaaggtgggtttcgaaagctgacccttctaaaaataacacctaagcacttgctaataagctactcctacaacttattaaaataagctaaaaaaatcttatgtcgtaggatctttttataaaaaccatcccaaacattcataaagacacttgtaacataagagaagctgttaataagcttttccacaaacaggaccataatgattactttttgttaaaataaaggattgctcatcagtgaaaataaattaaagaaggtgtaattgcataaggtgtgcaattttgttttctagttttcaattttgcgaattggatcatttaagtattacaattataaatcaaaatcgcacaattaaagtatttagtgaatttaatttcctcaattgaaatatgaaagaccaaaattacataaatgcaatacctaagacacctaaaataattaagctatatatatatatatatatatatatatatatatatatatatatatatatataaactactatcatatatcagagacggagcgaggagtactaccagcaccatcaaattgagacaagccaaaaaagaaaagtaccaagacataaagacaagccaatacaccaaaaccagtctagtagaggcatcaccacttaaacaccccaaattcagatacaactttaagcctacaacatcacctacagtaacccaatatgctaaaaaatggaagcacaccattccacaacaagacatcgaacgaaatcaataaatttaccacaatctggtcgctgaagccataaacctacacggctagctacaccaaacattggctcgaaacaggagcaaagttgtcaagtgagtactgacacaaggtgccctagtaggattgaatattattttttggcacacagagtctgagtaaatgaaacccaacaaacaaactacgctacacaaactgaatcacgtctaatacgctctaaaaacaaaatcgggaggcaagttccgcaaattaattaggattggataatgatgttgaaatataaatttctattaaaattaataggaaaaactctaaaaattaggctcgggaccgagagaatttatatattttttttatagataaaaatttaaataaggagaaaacacgtattcttgtaaaactacaagaaaagttatcaacatcaacaaaaatttgttataaaatttatatatcgcctatgaatatgcaaaatgcaaaaatcaaacctaaatcacagcaaggttttctagaggcactgtgcgactcaaagtttgagaagatggaggttttgaattgagaggagttgtaagagagagttgcgacaaccaccatatgcttatgcttggcaaacgacgttctttatcatgtgatgaagttgtcatctccaaggggaggtatgaaagaaattggagagtcaatacatgtcaaaaccgttgacgaacaaactatatcttaagtagaaattatatgtgttaaagatgtaggaggatttcgctcttcaacaacacatgaatgtcttcaatcagattatcaactaaccatctagcaaagctagatgtaaaaattgagtatgaggataaaacatgtattctgttgtgttctttgtcttattcttaagaacatttggtaataactctaatatatgagaaagactctattcatgtgaaggggaaacaaaaatgcataagagcataagacaaatgttatcgtgataagcatatgaagaagtccaagtctataaaacacaaaaaaacaactagtgttacaaatgtaactagaagggacattttaaaagggattgcctaaaattgaaaaaatttgttgaaggagtcaatctgatagagaaatcaatgattcaaattattataatgcgagaaatgtcaactaaagtgaggaaaatattattgcacataattttattttgaccaaacaatattctatttttttttaccatggttaatcgttaagaatattcttgacgtttccacattaaccttttgagaattgagatttgagactattcctaatggcatggattgccaaattctcaagaatgccgctgcaataaattgcattcggaaaaaaattgaatggtacatgtagtaatgttgagcctccttttccaccgaattttttttttcttaataaaggcttctatatttttcacaacatcaaggagatctcaggaaaattgacggtgtaagggcctattcattctccatcgatgaaaaaatatcaaatatccttggttccggttaaaaaaaggcatatttattaagttaaattacatctctataattttaaattcatctttctatttttaaatcaagatttttttaaaaatttcagaataaacaattatgtgacaagtggttatttaattaataaatttttaagacatttattttatttaattgattttataaatattattttaagtgtatcattagtgaagagttattattttttaaattataaaaatttataaattaaaataaatttaatatttaaataaatttaatatttaattttacatgtatttatttattataaaaatttattttaatataaattaattaaaatttgttattgttttattataattaaaagtatagattatttaaataattattttatgtaacttaaatggcataaatttaaaataatatttaaataatctaaaaaataaaaaaatattactttttattattaaaaagttgtacatgttacatcataaaaacataaaaaaattatgaacttgtttgaatataagtcataaatatttttttgagagtttttctattaaaaatataattttttaataacaaatccgttaaaaatacttctaattttttatccaatattatgtatctctacttatactttttttccctttctatgtgccagttgagtttattgatatgaaatgcaaggtatgtgcctatctgtgacctattttgtgtgagagagggagtactgagttgggctggcttaatatacaaagtaataaacaagattaattaaataagttttttgttggttacttagctatttcaatttttatttttagtttctcttaaaactgttgtttcgtttatagtctctcgtctatttttttattgtacaaaattagtcactgatcttggaatgggaataaaggataaaaatcaatctcacatatattaattctgaataatgaaaataaataagaaactaaaatggacagatttgaagaggaactaaaaattaaaatctaaaatagttgagagataaaaaaaattatttaacccaaaattaagatgacacgaagcatgtgggggagccatagcaggaaatttatttggagggtggtccccctcttcaggaagctactaggtagatcatacaaaattaaatgaaggcagttagctggtgagacttagcttttgatgcttttgagattagaatccacaaacgtcatgtcacacaattcttttttatgtataataacacagtgtgatcatgcaatctatggtttctatcatgcatactattcgaaacctcttacagccccaactgttataattataattataatgataatactctatatatttgatactagtatcccatcccatgtgatgcaacagtttttttttttttcaaatataaaaaaatatgatagaaaatgatgaaattaatgataatattcttgtattttagtagtcattgataactgtttaacattgatgtttgaattatcgaagaaaaacttgggtggaacagagaaattgtctaagagatgtatttcaatttcaaacgacatgacgaagaatttcacatttttcttatgtagtcaaacatacaagcattcacattggatgtccatatacgtatgaaataagtgcattttatatgttttggaacattttcttctagcaattaaactccattcatttttattctaaaaaaatcttgattcattttcctgtaaaataaaactatattcattttcttcaccacagcatataactgaccataaaaaaaatactgatttaaagaaaaattccagaagcattataatgataatgcctataatacccaactcctcaacaatagaaaaaataactaaaacaatatatattattattgtagcacattaaattggtcaatgaggctgtatatgaatgaaaaaaagatttttgtctaagtgtgaattcacagcaaaagagggtaactagccagttccagcgccaccatgctccaccaccgcttcctcctcgtaatctaccccggacaaggccaaataaaccccgcttttcagtttgcgaagcgactcactgccatgggtgcacgtgtcactattcccatcactctccacatgcaccgccgcatgaccaacacaaccaccgtccccggcctctccctcgcccccttctccgacggctacgacgacggcttccacgccatccgcggcaccgactccgattacaacctctacgcctcggaactcaagcgccgtgcctcggtgttcgtgtccaacctcatactctccagcgccaacgggggccaccctttcacttgcttactctacaccttactcgttccgtgggccccacaggtggcgcgtggactcaacctcccaacagctatgtactggatcgaacccgccacggtgctggatatcctttaccactactttcacggctacgctgattacatcaacgacgaaaccaaagagaaaatagtgcttccgggattgtcgttttcgctttcaccccgtgacatgccatcgtttttactaaagtcgaaaccgagtttgttgtcgttcgtctttcccttgtttgaagagcagatcaaacagcttgacctggaagctaaccctaaggtgctggtaaatacttttgaagctttggaagaagaagcgttgagggccgttgataagctcaacatgatccccatcgggccgttgattccttctgcgttcttggatgggaaggaccctgaagatacttcctttggtggtgacttgttacaagtctcagatggttatgttgagtggcttgactcaaaggaaaagaagtctgtggtttacgtttcatttgggagctactttgagttgtctaagagacaaactgaggaaattgcaggtgcgttgttaggttgtggttttccgttcttgtgggtgattagagtgaaagaggaagagaaggaagaggaggaggtgtgttttagacaggaattggaagggaaggggaagttggtgaagtggtgttctcaagtggaggttctgtcgcatggttccgtgggttgttttgtggcgcactgtggttggaattcgaccatggaaagcttggtttcgggggtgcccatggtggcgtttcctcagtggtcggaccaaaagacaaacgcgaaactgatagaagatgtgtggaagataggagtgagggtggatcatgaggatggcatagtagaaaaggaagaaataaggaagtgtttggaagaggtgatggggagtggagagttgagaaggaatgcagagaaatggaagggtttggcaagggaggcagcgaaggaaggtggtccttcagagaggaatctgaaggcgtttcttgatggcatggcgttgcagaatcgataattaatgcacttctttgccaaataattttgttggattcccgtcttctgaccagttttgcagttcatgctaaattattaattaatgctgttctttgttgttgtttttcgatctgcttcttttctttgcccacgagaccatcacagtttacgtggttaaaggactctgtgctgtgatttttcctgtccatctgtctcttttttattttgtttttctgcttcttttcttttttttttcctatcattttcaatgaattaattctaagtttaaaatactttattatttagaacagttaacttattattgttttaagaggtagtattattttaagtttaaatataaaattttttctttatagttatatctttatttaattttgtatactccttaatattattttatttaattataatttttgaaaaatgaatcaaactgtgaatccgcaaagggtagttcttcgttgtcgctgggttggattgctggtgtagttgttattgtgttgttttttattgcagtggtgctgtttgtcttggaagtgttttgtcaacaggcgacaggggaagttcagtagggttaatggtcgtgaaaatgggaaaggaagttttaaacctgatgctgtccatgtttctaatggatatggtggtgttcccagtgagttgcaaagccagagcagtggtgatcgcggtgaccttcatgctttagatggtccaacgttttcaaaccaagttcttcgacaagtgacgaataatttctgcgaggagaacattataggcagggaagggtttggagtagtttataaggggcagttgcatgatggaacaaaaatttgctgtcaagaggatggaatctgttgcaatggggaacaaaggactgaaagagttcgaagcagagattgcagttcttagtaaagttaggtatagacatttggttgctgttttagggtattgcatcaatggcattgaaaggcttttggtctatgagtatatgcctcaaggtacgttaacacagcacctgtttgagtggcaggggcatggctatgcaccttggacttggaaacaaagggtagtaatagctttggatgtagtgcggggggtggaatacttgcacagtttagctcagcaaagcttcattcatagagacttaaaaccctcaaacatactactagtcaatgacatgagagcaaaggttgctgattttgggttggttaaaaatgcaccagatgggaagcattctgttgggacacggttggctggaatatttggatatcttgcacctgagtatgcaggtatagaaagcctttgattttagttctgtacaattgtgccttaattgtgaaattcatattttacttatttggtggttatagttgtaggttactacttcgatggtgttcagcaaatttaagtagttcaatagagtaaccacacataaaaaaaagaaaaagttgaaagggaaagtaattgatactaaatccctagatacatggctacttcagaattctttgtggctatttctttgcaatgttatattttgcctgtttcacgtgttttttttcagttgggtaggggttttctgcatagttcttggtggtcgatgcctcaagttattttgagccatttatacagtttacagagtctgactcccaattatcctttatgatgtgatgaatactctggtttgcatcaaatcttggattgctgtatattgtcatgagcttaggtggtagttctctgtcgcaattaatcactgctgtggaatttatccttccatcccattgccttggtggctcagtgcattgacacatcttttgttaaaactagttaattttgagcttgttttgatccatttagcatcaagacttttgcaagcataaaacttcctaaaatgttgcattggatgtgattagatgcattttattagtgctagtctactctattcgtttgattatatttaatgttactctgtttcttgccagctactggaagagtgacaaccaaagtggatgtttatgcatgtggagtagttttgatggaacttatcaccggtagaaaggcattggatgatactgtgccagatgaaaggtctcacttggttacatggttccgtagggtactaattaacaaggaaaacattccaaaggcaattggtcaaattctcaatcctgatgaggaaaccatggagagcatatagaaagtggctgagctgccaagccaatgaaggcacttcctcaatatttaatgacatttccatctcacaaacccaatcaagcatcccctctaaacctgtaggatttgcagactcttttgattcaatggattgccggtagccaaattgataaacgagacaactatccaagggcatcttagtccatatgatagtggaaggtttgcttgagaatacccaagaaaaccagaggttgtaaagctgctttgatctattagcatcaccaatttctttgtaattgtttattattttcaaaatgtcatcttttgtgttcttaaaatctactcatctgaactaaacatggatctctgagtttggcgttctttattgattcttttaagccgacggatgggttttaaaggatggttattggttgggttacctgatccggctgattgtgagcatgattattttgtttctactttttttaggaatagaaggactatagtctatacatttattattttattaattgtattatattctttttttcccccttttgaatcagaagtatatttatcgcatgtttgatgtttcataatctttcttctttgcccgttatgcatctatttcaacactccatccacctataaggtctagtgtgtgtataaatcatttccactcgataccttacaaataaataatgatttaccaaatggagcaatatgttctctggtcaaatgaataatgagaccacctgcccggaatttatgatgtgttgtagttaggaaacttaaaaaaaaaaaaaaactttgtacgataacgaaatctacaaaattgtttaagcaattgagttggggatgaggtggttagatagtctttatgtaaatagtagttacaaaatttaaatcctttaacattgttggtaaagtctagctaaggttctatacctccattttggaaggagagaaatcaagccttcttaccgtacctttnagttacgaaactttaaaaaaaaaaaaaaaacactttgtacgataacgaaatctacaaaattgtttaggcaattgagttggggatgaggtggttagatagtctttaagtaaatagttgttacaaaatttaaatcctttaacactgttggtaaatctagctaaggttctatacctccattttggaaggagagaaatcaagccttcttaccttacctttcgtggaggaggaagcaccacttgaacaatcatctaattggtggcgatagaaagagacataaagggatttttttaaaagaaaatacataattgcattgatatactgaataaatttaattttttgaaaatggatataatcttaaaatttgggtcgtgatgtggtgattttaatttcacatgatgagagcctacacaatacgtgaacgcacatatggtgattcaaagctcagtcagtagatggatgataactttcgcaacaaagcacatgttatgtgttactgatttctgtcttctttattgtggttacgtatgccgtatccatgttaagttgcccaccacattctagatgcttttttttacctattggcaaaaatatagggcagattgagcagttgaaaataattgaattggtaatgataattgagattcaattatatatgaaagagaattgacccgaaaaaatcataaagaaagaaaattgcaattgttagataattacttcgttaccttttattttattgtgcctgctggtttttataagaacgtgaacaccaggttagcataacaagtgtggagtgtcatgtgcttagggtggtcagtggaggttccatggatcctccaaatttcaattgcaatattattgggtggactatgttccctgtttccaccatataaaatagggtttgtgtctcttttaatatcaccacttagtgtattgttatcatagcagaagttaattgatatatattaacaaccgctaatgatatcaacgaaggaatagtacgatggagggtaaaaaattcagctgcttcatcgcgtgtctgtgtatcaaagctgaattccatgggcaatttttttataaaaaagatacaaagactaaaacaaaatatcgaataaattacaatgagtatatttaagtctaatagaaaatagttaacttttgaaattttcctttaattttagaatgatcgtaatttatctattttcaatgattcaattgttattttttctttttctttttaggagcaatgattcaatggtttgactaatgaacttagttcatttttcgtttgagaggccttattattgatttcaaactaaagccatcaatacaagtgaaaaaaaatgacaggaattaaaagaatgacaaaaaggaattgacaaacaaatgcaacatatagcaagaatcaatgttttattctgcatttataatgcctacaaatcaagctatagtaaatggcatcaaggtttgtaagagaaaacttcttggatctacatttaagaacaagaaatctccgaagaaatgagatttaatggaaatggttggtccgaagcatatctaaatttgacaggaattccatatatggtttgaccaccattaacaagacaaacattgtgcaagaccttcaaaagtgaaggcttttcggatccaacggattgaaatcctttacaatttaatatcatattcttttgaacacacggacacttattggtgatagtcacactccattcttgttttccttgcactttatttcttgttggaaattagtgagatctttcaaagaacattgacgatagcctgatatcatgatatatggagaaattactaacaacaatatataaaaaaattatgtttcatacaatagaagaaagcatttaccttgagaaatgacagacaaggaacaaaactatgctaagaatcttgatggttgaaccagccatttcagaaaatgtaaatacaagcttcgattcttgaattgtatagctatgttatgttttgttatttataaacgaattattgcaaaacaatatgttttacgtttacatttggtgtgaaaaatattgcatttatgaacgattgaatttttaaaacaatgaaactgaaggtaaagaaacataaattactcactttaaaaaaattaaatacagtgaaattgtatagatttgataaatatgatttttttaaatatttgatatgattttattttactaggagaaagctatatttttgttctactatttctttcttggcatctgacaaagctaattaaaaaatatttcttgagtgtttaattgttttaaattgatttttttttaatttaaaaaattgttttcaatataatttttaaactttgttttcagtatagtattttttaaaaaaaattgttaaactttcaaaaatagatttattttataaaaaatttcataaaatatcagcatttatcaattacatgttgtatgagataaaacaatgttttatttatgaaagtatcataagatccaaaacaagagtaggaaagtaatttttaaaagacatttttttaagcagtgcaattgttcctacgaacaagttttaaaataagaatgtcttgaaaatctttctaatacttaatgaaaaatattaaataaaaataaagatatttaatgttttaaaactttaaaaacattcaaatactttctttatttaataagtaagaggaggaattattattattcaatttttttatattaaaaatattacaaatccannnnnnnnnnnnnnnnnnnnnnnnnnnnnnnnnnnnnnnnnnnnnnnnnnnnnnnnnnnnnnnnnnnnnnnnnnnnnnnnnnnnnnnnnnnnnnnnnnnnnnnnnnnnnnnnnnnnnnnnnnnnnnnnnnnnnnnncttcttcttttttttttttaaagaaaaagaggtgaaacgcccaaaataaatcatcataaagaagataattaacgtctatcgactttgaggagaagaaataaaacaactttattaaggaaggagaaaataaatttaaataattatcacaaataaattttgtataaatacaaataaattataagataataaatatgatcaatccgtgaaaaaaattgtggaagagcaaaatttgtgaaaataaaattgaaaaagaaaaattcacaatattatagaactttatagataaaaaaaatataataatcaataaatttcaagataaataatatattacaattttaatatttagttttgaattgaatcaaatgagatcatatatgctaacggtatttggtcaaactagtttataaactctcctcgtctctttccaaaaatactctttgttgaagttgtagttagcaagttattatgcattagagaatttgctgcaagaactttcagtaactagttggattggaaaatgttgtatccagctgtaaatcacctattccattattggaaggaaagattccatgcgaaaatgacattggtgaaaattgataaaggtatagagaaagtggagctcagaaaggtgttattcttcacaaagaggagcaatttccaaagcagcgagtatattactcgtgcaactttttattttttacatatatattattgcttgggctactccaattaagagaaagtagaaaacaaataaatggtattgattgatgttacgtaagtcacataaaagtttgatgcatattgtaatttactcccacagtcatttattggacttaaagttgaactgtgtaggcaaacatgacttaaagtttgattgcagcctctgcattcattccaatgacccaagttttataagcttatagtattttattaactttttaaagtgggaaaaaaacggcatagattcttcttgcatttgctatctgattctaagcaatccaatttcaaggaaaatgtcgtgcattgcatttcggtatagaaaataataaagaattatgttattcatgtaccattttgagatgtacaacatgaaaagagaaaaagaaggaaatttatcctctgaattttttggttgtaaatgaaaggccgatccattcacagatcatgcaaaactgcaaccgtaaatttcaaaattgtcatccaaaaagtaatctataaaggttcgtacggattcgtaatccgtatgaatgatcaactgagctactagaccattcatgttaaaaactaatttaaattgctatatataacattataaattttaatgtatatttaacacataaatttacataattaatttttatctaataatatattttttacatatataaatttttaatgtatatgaacatctaattttataaaattaaattttttaatatatatgaacctaatattttattaaaatctataacttttaattaagccatatttttattttaatttatttttatcaaaaaatatattttataattaaaccatgattttatctaatagtatattttttatccaataaaatatattttttataacaattaatttttaaaaatatattttattggataaaaaatatattattagataaaatcatggtttaattataatatatatattttttaacaattaattttaaaaaatatattttattatgtaaatttatgtgttaaatatacattaaaatttataatgttatatataacaattttagttagtttttaacatgaatggtccactagctcagttggttagagtgcggatttgtaattaaaggttatgggtttgacacctacttggaccatttttgaaaatcattttaaaaaattttaacttgtacggattacgaatccaaaagggtcttatggattgcgaatccgtaagagctttatggattgcgaattcgtaagaaccttacggattctttgtttcgtcttatggattacgaatacatacaaacctttacggattgcttttagattacgagaagggcaaaattggtattgcattgtatatgttgggtgtattagaaaaaatgctggtataggaagttaatgtcgtcatactcgtgtactttatttatttttcttttgaaggggggtccaaatagggaccagatctctgcattccaaaagtaactgcagcaccctgcaatcctcatccaacggttcgaaattttttaagctgtatttctctttattatttaatatatagttatttttcatggtcaggatccaaatcagccaattttattgagattactcaagctattttttgctatttgctatgcttagaattttctctccggcaattttgctttgtataaaacttaagatgcagtttcttagatggcttttgacattatttttcaatcataatatgagttccattccatgttttatgttaacatttaatgcaagtttcggtttacagaggtaaaattctaattttaattggaagacaacactaaaaacactcaagaaactgcatttttttcccttttccttttgcattagaaaagactggctacagtccagtcccattgatgacttaaaagcaaaagatgggactcaaagtttagaaaaagaaaaggtttcaataatcgtgggatgatgatgggttttggactacattactacacaccactttatgatctgcatcatttcactataccccgaaaaagcattgatagctagagttgaattttacaaacaaaagattagagatgtataagcaatcagatcaaactgtgattaatatctatggcattaatgtctaactcttttttgtgtgattttcttgattgcttaatttaatcactcaaattaaagaagtatactaccaatgcctgttattccaagtggactctagcttgattctttttaaggttttgatttgattcttatgaaaaaaagggtactaatgagagagatttgtctccttcaatgagtgctaactcggactaggaatttaatttttttagacagacggattaggagtttaaaaactttgacattggctaactgtaagacatcatatggacatttagcaaataggccataattaacatcattaatttgtataacaaaactgataaaataaccaatttgatctaacataaatatttaaaatacagaagtgaaactttttaaacttaagagactaaattgaaacaaacaaaaataagacaagagaaagtatgctttagccataaaaataaaagcagtatactaactggcacatattcctccccaacactcgctgatgatgaagatatttgtgcatacttttcatccgattgggccaaaaaattaaaaagtgcactgcacaaaaggaaaggactcccaacttttcttattttcaaaaagttacattatatgcatcatacatactttgtatgtttttatgcatttggaaagcctttgaaactctcctcctattagataatctgataatggatactaattcaagaaactggagatggtcaagaaaggcccaattgcttattgcttctgctcttctcttactgcaagactctctggtcaactctgctgaaacaagatctgtgagtgcaacttaagtttctagttctgctttggtatacatgtaaatacatgtcattgagcacaatcaattattaaataaatgcttctaggtgcacattgtatacatgggagataagatatatcaaaatccacaaactactaaaatgtatcaccacaaaatgttatcatcactcctaggaaggtatggcctgtgtccctcacatactcattttctaatggagctgatattctattactttaataagagtcaagaaaaaaaaataacttttaagtgttttctttttgttctgaagcaaagaagctgcaaagaattcgattctttacagctataagcatggtttttcagggtttgctgcaagattgacaaaatatcaagcagaagcaatagcaagtatgaatgatccttgcattaattaggcttgttatttaacccagtttagaacatttcaaaagttatattatataccatgtaatgcagagtttcctgcggtagtttctgtcattccaaatggcattcataaacttcatactaccagaagctgggactttatgggggtccatcattccacttcaaaaactgctttctctgacagcaacttaggtgaaggaaccatcataggtgtcatagacacaggtagtactagtagttaattttccttttaacaaaaataactaagcagggcattggaaagtggcaatgtaaccaatgacaaatatgatttcttgaaggcatttggccagagtcaccaagtttcaatgatgaagcaatgggacaaatcccatcaaggtggaaaggaatttgtcaagggggaaagcacttcaactccaccaattgcaataagaagataataggtgctagatggttcatgaaaggaataagtgatcagactaagaaattcctccaaggaaacaacactgatgaatatctctcagcaagagatgccattggccatggcactcacacagcttccacagcagcaggttactttgtaggaaatgcaaattataggggacttgcttctggtttagccagaggaggagcaccgttggcacacttagctatctacaaggcttgttgggactttccaattggagattgcactgatgctgatatcctcaaagcttttgataaggctatacatgatggagttgatgtcttaactgtttctcttggcttttccattcctttgttctcctatgttgatcaacgtgattcattagcaattggttcttttcatgcaacttctaaggggatcacagtcgtttgttctgctggaaattctggtcctgtctctcaaaccgttacaaatactgcaccatggatcatcacagttggagctaccaccatagatagggcctttccagcagccatcacccttggaaataaccacactgtgtgggtatgctacaactatttttgaatcaacctggtcaaatatgctaacacttaatacaactgtcttaaatgtgttatatatgtatgtttaaaaaaaataagactttacatggttttggttcttcaacaagaatttccactaattttagttcttgcaaatttttaattaactttctttaaaatgttcttgtcattattaagtggtgacgtgacatgcaaaaaagtcatgttatcttacattgatcactaatgtaacatgattattcgtatttcatgtcacctccttagtaatgtcaaagaccattgctaataatctgtgtcaatgcattgacaatgtaaaaattattgtcattcaatcgcaaaatattatgtaggttaagtttgttgatttttacaaaaatcatatcaaaaacaatttttgattggttggcaatacaaatttttacactgatactgcataaaaattaaactcattttataggattaaaatcacctgaaatcatatttatgagaattagatacatatttaaacctgtgattattgttatatagggacagtccattgatattggaaaacataatcttggatctgttgggctcacatattctgaacgcatagctgtagacccatcagataatttggcgtgagacctctttttttttttctttcatttttactgttttttttatatcaaattcctgtacattttatatctactgttcgtgtctgcctttcaagcaaggattgtcaatctggaagtctaaatgcaacaatggcagcaggcaaaattgttctatgcttttcagtatcagatcaacaggacattgtttctgcagcacttacagtgaaggaagctggaggagttggactagtatatgcacaatatcatgaagatggactcaatcaatgtggttcatttccatgtatcaaggtagattatgaagcggggacacaaatactaacctatattagaagatcaaggtgagctaatatacttagattgacaacattggcttataaaatgttcattgagttaaaattaatattatgcttatctggaaggtttccaacagcaagcctaagttttccaaagactgttattggaaaatgtacatcacctcgagttgcatctttctcatctagaggacccagtagcatgtctccaacagtgctaaaggtatatctggacctcatttgcagacatgattttgtttttattcaatcagaccaaacttttttcccggaaattttgagacaaaagcaattaaatatagttcatactttattataacaacaaaggcaaatttgatttgagcgtgcttaaaaaatgtttatctagtgtgccatgatctgtaaattgtagtcaacaacttaccataaatatttattgctcttactccgtttttaattatatgatgtcatcattaacttctactttgggggatgattcatggaggtagcctgacatagctgcaccaggtgtggacattttggctgcatttccaccaaaaggcactacaaggagtagtggatttgcattcctatctggaacttcaatgtcatgtccccatgtggcaggaatagcagctctcatcaaatccaaacacccaacttggtcacctgcagccataagatcagctttggttacaacaggtgagtcagtagaaatcattaaatcaacaaattaaaattacatatttacattattacatataatagtctgtatccaatgtatctaattaattgttacacttaaaaattgtagcatctcaaactggaactgatggaagccttatatctgaagagggttccacacataaggcagcagacccttttgatattgggggtggacacgtggaccccaataaagcactggatccaggactgatatatgatatcaccactgaggattatgttcaattcctatgttccatgggtcacagtagtacatccattagcaaagtgaccaagaccaccacaagttgtaagaaaggaaaacaccaaaaactgaacctcaaccttccttccatatcagttccaaacctgaagagagctgcaacagtaatgagaacagtgacaaacgtgggaaatattactgcagtctacaaagctctagtgaaggttccatatggcataaaagttagagttgaacctcaaactttgagtttcaattcagatgcacgaatccttaactttagtgtcagtttcctgtcaactcaaaagtttcatggagattacaaatttgggagcctaacatggacagatggcaagtattttgtgaggaccccaattgctgtgaggaccatacagtttgaatgaataataagcggatgtgatatgtagaaatgagcttaattggtcaacaaaatatttaagttcttgtttggagtcatactatgaacttagtatattctttggtgagaatatgcagcacatttctttggagaaagagaactcgtcactcagggaatatactgttcattttcaagattaaaaacgttacttgattgcaactaacaattgcttttaaatgaaatagatacttgacaccgatttcaaactgtgaagagcaaatgtcaaatattagaaaccaaaaaaacgacactgattttgacggtatcttaaataaatatatgagatatagaatttaattagaccaaaataaattaaataaaacttatataaaattgaggatttgattcgaattgggaattttttaaaatatgaaaattaaaccgggaatcaaaattataattcagtctattattatcaaaaaggagaaagtatggtactacattttttaatattcttttcaactttcctctaaaaaaaattcttttcaactttgttttattagttaaagtttatgtggattatactaattttggaatgaaactcattaaatgaaaaatgaaacacatatttaaccagacttgcgtcaattatgctccaaaaaaaaatgaaacaagaatgtcaaagagtctggtgctaatatgaatatatgaaacaagaatatcaaagaatgtggtgttaattttttttttatttttaaatactgatggagtgacggaagcaaaagaataaaaagtagttcaacnnnnnnnnnnnnnnnnnnnnnnnnnnnnnnnnnnnnnnnnnnnnnnnnnnnnnnnnnnnnnnnnnnnnnnnnnnnnnnnnnnnnnnnnnnnnnnnnnnnnnnnnnnnnnnnnnnnnnnnnnnnnnnnnnnnnnnnnnnnnnnnnnnnnnnnnnnnnnnnnnnnnnnnnnnnnnnnnnnnnnnnnnnnnnnnnnnnnnnnnnnnnnnnnnnnnnnnnnnnnnnnnnnnnnnnnnnnnnnnnnnnnnnnnnnnnnnnnnnnnnnnnnnnnnnnnnnnnnnnnnnnnnnnnnnnnnnnnnnnnnnnnnnnnnnnnnnnnnnnnnnnnnnnnnnnnnnnnnnnnnnnnnnnnnnnnnnnnnnnnnnnnnattaaatgaaaaatgaaacacatatttaaccagacttgcgtcaattatgctccaaaaaaaaaaatgaaacaagaatgtcaaagagtctggtgctaatgtgaatatatgaaacaagaatatcaaagaatgtggtgttaatttttttttttatttttaaatactgatggagtgacggaagtaaaagaataaaaagtagttcaacttccatgaataaaaatggtctttccatgatttgcacttaatctaaataaccaagcacaaaatatatgaaacttgtgcatatttcagtttagtattaaactattaataattattgattagcgacagaatttagatttataaagacagtacagttaattaaatatattttagtaattattttaaaatattctttcaataatttaatgattaaattaattactcttttgtttttacattgtaagtgcaagcatctactacgtgcaaaaggaggatacgatactcaactatagattaaacttgcacatcatcatcagtcttttttttactatagattaaaaaggctgttagcgaagttgaaaattatattaattctgtttacttccgttcctttacaatataactcacaaaaaagggtaatggagttctgttccattcccttattattcttccagacaaaagataagagaaacaagcctacattacaacgttataagcagcaaataacctacaaagaaaatcaagataaataaatagatgatacaaatttgcatgtgtttggatatccaatcgacatcatacgtttcgatcaaaattcacgttttggacataaaagcaactcttcgttgcttcagataatgtgtcacgaagcagtggatgcgaaaccaaacatagaaaattatgcttgcagaatgaaacttgtgagttatgatggagcaccaagatatgaggcaagtcgtaaaatatcactaaatattccaccagctgtgacttgagcaccagctcctggcccacgaactatcagaggttgatccttataccttcgtgttgtaaatgcaataatgttatctgacccagacaattgtgcaaacggatgatccttcttgtatcttcgcagctctaccactccttttttattagtcacgtccaccactcccacgtatctcaagaccttcagagtgcaaacataacaatctcagagttgtatgtggaggacatgaaaaatatacgtatatttaatggacataatatacatatacgagagatgtcatcatgaaaaatagacgtttatatatatagtcaaggacacaaactggagaccgcaaacccaacataaatcaattgtcatacttttacttgaaatcaaggtctatatggaaatctaggttgcttgaaatatataacaagcatccttccatcaggttggagagagagtcttcattaaccaaccaattgaagatttgatatgcaaaactttggcgttttggtatgtcatcagtctaatcagaaaattcctatcccaccttctgtgtctcaaataagtactatatgtttctgtgtcatgtactatgcagaattaaaataaatatataacaaactaagggtacctaatttgtaaggattttttttcccttttcggttatcactaaaaattataaaatgcccccttttcaacattacctgtacatatctttgaaaatataaaagaaaatgaaaataaagtagcagtttttttttttttttttaatttgtatggaaacaaaacaaaccctaagatattccatgcatgaattatgcatgtatgaagcagttggtagaactattctattagatactttaacatagaattaatacttatttttttggaaaggcacatagaattaatactgtcttagaatttactcacttccccagcattctcagcatcttcttgtttctttgtgaactcctgatcaaattttggtagctcttgcataaactcctgagctgatgcacaagcctgcacagaatcatcaaaacatctatgtcaatcaaaatactacatattaaaactaaaaactgcataatcaatagaaataggttcttactcgtagtggttctggcacaaggctttcaactggaatattagacagttctagctttaaaccagactccctagcaagaattatcacctgtagagtcaaagcagcttcaggatgttgattttaaatcagattacatgaagcaacaaaatgctaacatgaaccaatatcgacattgtgattagcctacatgatccaattagttgcagaaacaagcaagccttccgattagttacaacaacaaccaaacattttctagaatggggtggtcaactaaatatggatttcacaataaataaattaaaaaatacttaccaatatatttatttatttctacatttaaaattaaaattaggatatttgctcaacaaaatttgtgtattggcaccaaagaggactattgataatattaatttcaattgtgtataggcacaaaagaggaatattaataatattatcaacttttgatttgtgtttttaaatcattaaatgctttcagcatgtcaacaattaaaaatatcaaatttgagcatgaatcgaaatacttgataactggataggtagatgtatatcaaatttaaattctagcctgaaaccgaattcaagcttcaaaatgtttgatcaaatgagcctcaaacatataaatatttaatttggatatagtcttttagatcatttagattacagcctactcataaatcctaaacgaaatccaaattcaaaatatgtctgcagcataaaggaactttattaacatttgacaacaaaatttggtaaacatataccatattataaattgtacctttctggcaacatctgttccagacagatcatctcttggatctggctcagtataacctgcttcctttgcttcagaaactacctcactaaaagcccggccatctttaaagttattaaatatgtaactcaaagtcccactgcagattcagaggcaatactcatggtgaatggtcgagattaatgaataatcgccatatagtcattaataatcctcaaaataacattctattttttttttttttggctttagaatgggaaaattgcaagagggtggacaaaggagactgaatgcaagatctgagaattgacagtgtcaatccaaaaaaaaaagagaaataacacatcaaagcaaacctaaagatgccttcaatttgcagtattttgtctccagtttcaaggaggccacgtaaagtgctaacaattggaagaccagctccaacagttgcttcatagaagtaatgtgtataggattgcctttgaagagctcttaacttcaaatactggataaagagagcatagatgtgaaaaagctagcatgagtactaagaagcaacaactgctgaagcttaaagaaaacactttcaaaattatgaaaaatattattaaaacatgtcttcaagttcaaagtacttgttctatcagaaaagcatgaacccaagccaatgcctactgttgttcagcgttccagtttatgctaaccatgaaatttgatcgtagatgttaataactaaactatgaaacatcacttggtgtataaagcaataaatttccaaattgctaaataaaatggaatgacaagagaacaagttgcagactggttgacatcaacatttaaatgtaacaagcttatacttataaatcattcctgttagaacaatggtaccactagtcaacagagtccagtgaacctgggtttagagagagaaacagagaaaagagtgagaaaattgtttaaaactgaaatgatgcattgaatcattaattttgttggctccatagtcttgtatagtgaactttagcttgcacttcaataaccagcttatcactttgaaatttagccaaactgaatactatgctgagtctgacgcagctaactacaggttagtgacagccatataactgctggacaataaaattacaattactctggtactagcaaatatgatagctgcaaaaatgacacagaaactcacatgatgatattttgattttaaaaaagaaaaaaggaaaaaatagacagctgccagtggatagaggtatgaagtaaatgatagaaataagagtaaaagcttcctatccaaactccctaatattgataatgtgatgatgtgtatttccctttcctttaaatgaattattctttaatttataaaaaaaaacaaataaaaaattagaaaataaattaatccaaactaatgtctggaaatttccattttcagccgagtacttgcagaaaaaatatcttatagcattgattacatgagatacgtcaacaacaaacacaaacatgttatacatcaaaagaacaatatggattactttacctgatcaagtggtcctgaatttgccttcttatttggagtgactacatgtattcctttgcgcaaccagtcatagtaatagccagcaatgacagagtcagctgtgcagtccactaatgttgtgtttggtataaaatgatttccatgtacatgttgaacaaatttttctatattagccacttctcctctttcctctcgaagttctctccatctagctaagtcaatgcccctgcaaggagcaataatagtatataatgattgaacaaaaaccaacttcaagaatgcacatataaccaacaaatcataggatgaattttgttgatgtagctccaggaccactgtattaaccaatgaattcctcttgccaacagattaacttcataattgttagcaagagagagttgtcaaaccaaagtaggaagtccaaaaaccatccatatcaagaaacatggctccccaaaagcaatcaggtattgcctacattttgagtccattctatctaggagacctaatcatgttattatggcttacttaaaaatataataatcttctttcatccaaataacaatacataaatgatatataataaacaataaagctttccaaaaacagtaaaaggagtgaagtgtaaaatgaagtctgctttctcacataaaaggcctcttagttatacaagcaagaaatttaattatcattcaaagacatatttcagtcagagtggttcaacttacacatcactaagaagcatcgactttgaaccaagtatgcccattacacgcaaatcaatgttgaattcttctttcagggttgaggcctgcattaaaagaattgtcatgtgaatttgccacatatttcaattatagtatgttaacatgataaaatgaagttaccccactatagtataccaggaacatattttaacacagaaatgtaaaaagcttgacaggtatcaaatctctataaaaaaaatatctcccagatgcataacaatgttagaatccggaaagttgtgccttggtgacttattggtcataggttcgaatccagaaacagtctctttgcatatgcaagggtaaagctgcgtacaatatccccccccccttaccttcgcatagtgagggagcctctggacaatgaagtacgtagttttatttttatagtttttatgcataacaatgttagagttagacaagtaaataccccatataagaaacctattaatatttaataaaattctagagatagagagagtctgaatctattttctgttattgattaatgaatcacttattactatctgattgaagataagtttatatactagagctaccttgttctgcaagcttacaataggaatttcagctgtctacagccattaagaagactaactaaacttcagttaagccaattctaactgtgctttactatttaagtcctagtttacaatttctcattctttttctttcaattacttgttttgaaagcaatcatctgaattttctctatcttgtataatgataagaaccttgggagatttacaccacaaaagcgagtcattgtagtttggagagtcaacagtcttatacatcctaaacttcaaatatgagactcaagtctcataccttgcaattggatcctaacattccatcttgcttcccagccccgtgcccacatgggcaggctgcgcaataacctttaactagtccctagcaaaaactacaatgccagcatcaacacacatgtcactcatttgtagttgagaaacacagtggaaatatctgatatcaattagataagaaccttggaagaaccatacaacaaaaactagtcattgtagttggagaccccaaagtcttgtatataaacactacagtagaatgtcacatttctaatgtggtggcaccttttttacttacattgacaaacaaataaattcttttgaaaatgtattttaatccgtaaaacagttacaactggtgcagcgtcaacataaagaaaattacctgctatttaaaataaacattattcttcaattataggcattatttccttgaagtggaattttaaatttgaaaaaaatagtcaatttcacagcaaggataataaaagccaaattacacaccaaaacataaacaaggtaaaaccaaaaaaactattcatgcatacaaaatcgtctacagaaactgcacctgatcccttagctggtcaagtagtgtgctcccaattaatccaggtccaataatgcccattgctatgctggttcttgagagataaaatctggaatggacagctcgtaaagcctttatacaatcctctcgcttaacaacaacagtaatattgtactcagaacaaccttgcgctatagcacggacatttatattggcctgtttatgaaaacaaactagaacgtaaaacaagcgaaaatatataacaaaataagcaaaaatttctaacctaagcaatatcttaaacataatttcctaaccttagccaatgcattgaaaagggaggcactaacaccaggagtgcttgccattttctggccaacagcagccagaatgctacaatttggaatgactgcaacctgagagattatacataactttttttaatgcaataaaggtaattaaatagcaagctttaaattttaacatcatcagtcacatatactaatttaaacagaagaaatgaaattactcggttctcaagtttctacttcatgatagttaacaaacaaaagaaataagcacaaactgatggggaaaaagaagacgaagaagaagcattccatttaacacaactttcacatccaactatcttgtgaggaagaggacaagagtatattccaagagactgcatttccttttgattatcaaacttaaacccattagtagttctatgttccagtcatttccttttttagttcttttcctcttctttcctcctcctttcactcctcttttattttagtttatttttcctctcttttgtcttttttctactttttcttcccctctccctttcgcgttctttgtcttatttctgatttatcattgggttcatctaccaccgatcccaattaacttgggttaaaggtgttgttgatgttgatgtatcaaatacgttattgccatattttcagagcaaaaaagtagcaaatccctagttagtattttattgaattatattatgaacatccttacatccaagcatcaaatacaacaattggtgaacaaattcaaaggtaacacccaaactttttgtgataagcgagcaaagataactcaatgcaattcaaccatggcttctacgggcataatgatctattgttcctggaagactcaaggctcaagccttagtgttatttgatgtccttcagccttcatctttggcactttaaagaagttcccaatggatctttttgcttgacattttatagtaatccttgatttttatatcaatctagtgccaaaaataatagtcttagtcccaactgttgatatctgcatcaatgatgtttgcttccactgttctagatcataatgagtggactgtagcttgcatatttattttaaccctaatatgcccttgttgttaattaatattaagatgaaaattaaaacacttacgcaatgaagacaaattacatagaaaagataatacaacacttaaaaaaattaagagcatggcaccatggttttaaattgcggtctgctaccacaattgcagccgcaacataaaagttttttgactcatgacaaccacatcgcaacagcaatttaaaaccatgcatggcactcaaatgtttcatccagtttttaaatccacaaaatgtggaatgataaatcttcagtctgatatcactcaagtgagtcaaatcttaacaattgaacagaaacatgcatttggttttagaagaattggatttagcacctgagaaagacgcccattatccaaagcttgacgaaatctagattgcaatgcctcagcaactgcttttacctctttctcgggcacagcaaagcatacagaatgctcactactagcctacacaaatactgttactgattaatgccatttcttacaacgtgaacaactagaaaattgaaaaaagttataagtgcacctgagatatcatgataacattagctccgacatcttttactgcaccaaaaatagcactggcagtacctggaacaccagccattccagttctgcaaaaaagcatcagagaaaaattcattggaatctacaacttggacaattaatattggttaaagaaaaccttaaattaaatacaaatcctcatgcagcaaaaaatgccaactattcataatgtaacacagctgcaattcatgactcacccctcaacatttataagtgccaagttgtctatggttgcaaatcctttgacaaaattttgcaggttctgcatatcttcatgatcattaacagaaggatggcagatctttgttccaggagcagaaaggttgaaaatgttccttatcataatgggtatgccatatcgcatcacaggaataattgtgcggggatgcaagacatttgcaccaaaataagactgtacaacagacaatttggaagttaatctcctttatttttatgagcagaaggagcattgaggctttccagcatctaactcaccatttcccatgcctcttgataagacagtgtcttcaaaatcacagcctcactaactgcagaaaatataattgtttatatttaatcaaaacttcatgttacggaagtcaaacacaagacaaaagcatcatcaatatgtcagagctagaactccatctggttactaaaaaccaattctcatgatccagtccactcaatgtttaactcagacacaaagtacaaagcataacaaaccttttctaggatctgcactatacacaccatcaacatctgtccaaattgtgacctgacgagccttaaatagagcacccataattgctgctgagaagtcacttccatctctcttcagtgtggtaggaatgttttgaggtgtgcttgcaatgaatccagtagcaatgattaccttacatggattcaaagagtaccatttttcaagtctttgctcagattccaaatagttaggatcaacttgattagaacctgtaggatttactataaggacatcccttgtatccatccatttgcaatcagccccattctgtagaaccggaacagaagcatgatgcaatgagctaaattcatataaagggggaaaaagcatatctttctaaataaaacagcacaccataccttcgtaataactagagacaacatctgagcagaccataattctccatgtcccacaacaaaatctgtaaaggactctgttgcatgaccagctgcaagatattaaaaatgttagtcaggcttaaaatgcaattccttaacccaaattcattttaagcaataatatttatggaaaactaaatatcactttttgttgtggaaaaggtgtttacagagatcacactatgaaattatgggaaaaggtgattgagcatagactaagagaagagactggaattgtttgacttaatttggatttaagccaaggcagtctacaacagaagcctttctcaatcttaaccacccagcttatatcttgcgtgtgacttgttcattaacttcctcatcattctgtaatattgatcctatatgcttaaacttagaaatgtgtggtaagatattttctacaattttcacttctaaatcattttccttttgtttcaaaaattgcaatgcatatatattcctttctgctcctactcaagtgaaaaccattttattccaaagtttgtcttcaaagcttaagtttagaattaaattctttccatgattctacagaacgggactgattgcaaatatatggatacaagggatgtccttatcgtaaatcttactataaatgaagtttaatgaaactaatatcttattgaatcatctaattcctgataagaacacagtttcaactctaattcttcaagtaattattacaccaatccttttcgcaagtcactttaggtcttatactaccattgcatgcaggacaaaaaagcaccatggtggtaatctaagggttatcttcaactctagaatttactcaagaaacacattcagctgccaactcctctctgcccccatttcaaacttgtgttccaaccctgataaatggttccaaggaaacaacgtggtcagcaaatttaactttactattttcactccttatctcccttgtatatatctcttggtcaccaaccaaataaaacttgattggtgtaaagatcttaactgaacgaggatgcatagtgcagtgactagtttctgttaagatctatgttgaaccccaaacaaaataaagtcaaagctggtgaacatttatatatactttgatttttgacacatgaagaaacatgcataatacaggtgatgtgactaattgcatgtgtactacaggtcatctaaccagtagcatatatactacaggtcatacgatcaatacatgtatactacagaagtacagatcatgtgactaatagtattttccatgaaatacatctaatctgtcatgtgatattaatgaccaaaaagtaccatacattattattattgtcatactagtgtccaagacataagcaatgatcaataatataaaatagcaaccaagacatagctagtgcaatatacatcaacatcaatactattacaatgtgaaaacaacaccagaaagtgaaagccataaataccgacttataataaacaaggacaacatgaagatacatcctaggttcaaaagaggatttataaaagaaatagatataactgaacaagagaaaacagaacagagtatcaaagagaaagagagagttgatgagcttataacctatgtatattgcacgaagcattgccttaaggttactaatatcatgatgcaatttagacaagaaactagcaagattatctccatcaagtatgtcatgtgcagttgcactgtgcttctccaaaacagcatccaatgcagctatataagactcatcacgtgattgagccttgtggataaggtcatacatcatatctgtcacctttgacattgcagagacaaccaccaatttcctctccgaatcatccttaagaattatgtcagcaacattttttattctttgagaggttcctacacaggttccaccaaatttgtgaacagaccaagtttctcctttgggtagttgtttttcctccaaggacacactccgtgaaacatctgctagcaaataaagaaaaaaacataagttactatatttgtctatttcaaaacaaaaaggacatgttctatcataaaagtaagtcgcaacctgtaaatgaagaacgtactgtcgtacttggtgcctcccttcctcgtggtaaagtaagacccttcctgagaatcagtatatagcaaaacacaaaaatccaattaatttcatggggagaatatcatttaaacacgtatatactgccaaaattccgagaaaacagtttatgctctgcaaaggataaataaacaaaaaaaaaaaaggagagtagagaatatactgtgtgtggagtaaccaatcacttaaaagcttatttagaacgtatctgccaaacaaacgatgtttataacttttgttaatttgctcttataatcttattattcaaactgagggaatataccctcaaattcctcattcagctgataaacttaataatcaaacatcacgtttcataactgagattcgctctctcttctctgcttattctttttcttttaagagcaaaaacaaaaaagaattaaaaatagtaaagtcgcatcatccaataaggaatgttcaagtaaaacacaatagcgagtgactagctgttgtatgtgtggtcaaagttagaaaatccgagacatggagctacaaaagcattggtgtaatttgatctaaaaccaaatgcgaaaaggatcgaggaaacgacgttgatatgcgaaacctagtagtcgataggaacgtaccggagtgaatgggaagggcgcgagaggaagaaaggggggcggcatggagaatggaagagcctatcgtgagagtgagagtggagcagagtgtgagtgggtgaaacacgggagaactgagcgacggcggcagaaaacgacgccatgggtggtggctgctgctgcagagtaaaatgctacggaaataaaatgaaagcacgtgtgtatctttataaactacaatcaatgattactattgtcgtgcccctagggatgcaatgcggcggcgagactactttcctggtggcgttttactatttttaataggtctaggtaaaaatcacttacatttgctatttagtccctcacctgagaggaatcatatctacacagcctaaatagtccctaaaactgtgtaatacagtaatactatcaaatcagttaatgaacttttgaatttaattttcgaaagtaaaaaagtacgatatattaatatgtcactattttattatgggctaaattgtttaaattgttattagaatgaaccataattcatggcataacaaattttcaagttatcagaatatttgaaaaaacttatatttatctcatttgaaagaaacaattgaaaatttgaacatgtaacgtatcattaggggtgaaaataggtcaggtcagactttgacaggtatgagtctgactcgcattactattattaagtttaagactaacttattacatgataaaaataagttattaagatctgaatctagtttgtataaagatctaatctgacctgaaaacttgtatacaaatttaaattttgattaaataaaaataaataattaaaaataaaaaataacataatatatatgtttctcttatataaaacctatagcttgacctttttaattaaaaagacttttcccacccctaaccacaagtaatgcggatagagagaaagagcaatgcaagggtcccttgaattatattgtcttataaataggtcagtttaataggtttaacagactttttttaaagtttaagtctgacatttttatttaaacaaacttttcaaaaaatcttaatttagcttttataataaacaaactaggtcaagtcaaagaccacttatatccattttcatccctacctatcataagcaaagcttcatcttatttcactttattaatattttttttattagcaaatgttacttttgttaaaaatgtaccttttttttctcccttcacccttaaaactccattttcaaccattaaattaattttatatttttacttgactaatcccttatgagtgtttagtaggggagaaattttccaaaaaatgttagttagttttctatgaaaatcttattttcttgagttaaaattttctctgaatagtgtaaaaatataatattgcttttattagattatttattattgtaaataattaaagtaattgataaaaacattacataattatttgattttcagtaaacttatttaaatatccacaaaaatattgaatatcaatcaaatattattcattcttgaatatgaaaaaaattcttctcctagcaaacgttccgctaatgttaatagtgttgttattgtagtttaccttaatgacttgcattttttttttccaaagagacaacttgtatttatttacagataaatgttttttttttcagtttttatgttatagtattttcaatttaacttcaccgtgttcttgtctctactcctgcttttgtttcgattcctttgttggaagatgatgctattgttctctttgaatctttgatcatggcttttaataaattcgtcttggtttggggctgaaaaaaaacacacaccacaaactagttgaaatgaaaagtagcaaaaattagacatttgtagggagaataaagcgtagaaggaaaaaaaactaccacttggttttaataaaaacattttcccacaagcttatcttgcaaaattttaagaataaattacaattttagttcttgaaattttaggacattgttatggaagtatggactataatgataggagaatataaaatttaggaattataataataatactaagttgtacatatcgtagattaattaaaatgacaataattttaatttgaatgatttatttaatatttttaaaattttatgaactattataacgatgtctcatattttaaagactaaaataatagtttactcaaaattttgaacataacattacctttccctacaaccttcccaaatactgtgatcagtttgactcatgcttctgaacaaaaccagagtccataaaaggcaactacaattttttttcccttttgtttcggggctgatggggaattatagccattgtgagaattttataagctttaaattaaaatctacatattcataacaaaataaattaaaataaaaaaaagttatcacggatatttcagttataaataattcaaaatcatactttaaataatactcaatgactataaattttaaatttatttgtatacttatatttaccccatttgtcattttatgtgattaaatatagatttctaaagtaacatatgattgcatggtttaataataaaataatcaaatgttaaatatatactaacaaagattaacacaagtgatagtatcttctaatgattggtccaatttatggtcgttaccacccacgtaccaccaaacaaagctgcgtttagtaactaacagttggagaatttacttctcttcgacatctacaacaggtatagtagaatattgagttcaatgtaatctgtttagcatggaatcttaaaatttgtatatctatctgtcggtgtatgcacgttttctatatttttcatccattagagatgtgaaacaaaggacactgccaataaaaggaacctggtgtttacctgaacaagttaaatttgaaagctccctatactactattatttgaagaaaagttctttataatttacactaataaaaaaattcttaaaacatctggccctcgccacctacttgccacgtttttctttttaaatatcttttttaatgttcaataaaattagttttttagcacattgtgaagggtatcaattgattttacttcataaatgttagagtataagtctgagttaaagtctcacttcggatagaaatagaaaaatttaacactatataagtgagtagaagactcataaggttgagctttaaggttttgggtcaagatgtggtgtccaattcacttatatgactacaagtgtaaatctcctatatttatccctccttcccaacccataatatgtctcaaattttcattttaatgtatgtatacattgtatatatgtatctttgtataattgtattgcatttgcacgtactatgtaaagtacaattctacggtgttcaacatgtgttacatgcaataatgaatcataaacaatattataaatgagtaacaaacaagttgttcttaaaacacgaacgagtaagacaagatcctgttcttgaatttgtttattaagttgttgagttttgctcaaccttgtttttacgctggtttgatctcacctttggaaatcatagaagttccttgagtattaaccacttgttataataagagaaggtgaaaatgttgaaccggtggaaattgaagaagctgcaatgaggagtagcataattcaacaaattgttgttgttggccaggtgaattcttgaattctttcaatttctgatagctagctcaagcattatatataaaatgtacttcagatagtacaaaatgtagtgattatacttcttggtaataactgtaacttacaggataagcgacgtctaggaactgtaatcgttcctaacaaagaagaagttttgaaggtagcaaggaagttgtcaattatagattccaacagttcagatgtcagtaaggaaaaagtgacgagcctgatatataaagaattgaagacctggtaagacttatttcatttctgtttcttgtaatgaatgccggaaaaaagtttatgccttgttcagatatctctggtgtgctagtgtttttctgtttctgggggaaggacagtgtttgactctattggttaattagctttacttaaattttatgacaattaaagggagtaaactagttttggacactgttatggtggagtcactgaatgataaacaaattaaatgtattctataattgaactattcatcatgcaggacatcagaatctccatttcaaattggaccaatccttcttgtaaatgaacccttcaaggttagatttggaattcaaagcagtagtatcttgtatgttgttcacatcacaaaactgacatatttggtaaatccttttctccaatgacagattgataatggtctaatgacacccatcatgaaaattcgaaaagatagagttgtggctcaatacagggagcaaatagacaatctatacatgtaacctattgaatgccaatggcatcatcaaacacaagagatcattgaccgtatattaagacagtgaccttaaagtcctaatccttggttggcaattttttttcttttcttttctgttatcttacagaatggaagatactgttctcaacaatacattgacgttgatgtatttagaaaatttggctcgaactaagatgattgtttactaaaattgaagttaaattgcttgtaactgaaaatgtttgccttttattttgaaagtgataaaatgcattttccgtttgaaaataaaaaataaaaaacatcatgcgttaacttttaagtttttttagataaaaaaaggctaacgccccaaaaaactaagaattcaatcagaagtaggcagaatagtcaatttggttcttaaaagtatatgacggcttcaagttagtatgttaataaactaaaaataaagtcttcgaaagtagctttcctctctcacattcatccttcgtttcaaataggtctttgcatttacatgttatcattaaaatgcaatttagtcctgaaaggacaaatgtaaaagacaagctatcttcaagggctttatttcaatttatttgaattcaaggactaacttgaaactgctgtacacttttttggaccaaatcgaccattcaaccatagaagtaggatattggaaggtcctgtaacatcaacaaacattaatccttttaatggagagggagggtcgacaatccatgaacaccacaatattctctaggtccagtttgcaatcctacttaattgtggtgcctagagactctcttctctggagggggtactgaatttataaaattaatgttaaattccaaaagaaagaaaaaaaaaaaaggtaagagtctctcttctttggagggagtactgaaatgaactcctaaaatttgcatagtatcatatagattgattcaaaacatttgtcttctttacttgttttattttcagtttcagtaattaaaaaataatatattagtgcgtaaatatcacttttaagtaagaatatttttttcttctgctattttttcttagtcgacgtgtatttttcaattgaagagagtgaaaaagagacaagtaaaataaaagatgattttattccaatgtggatacaattgatttgagaaaatgtttgaaactactctatgtggtaaacaaattggaggttttctaaagctctgaattagtgaagtttcacattcgactgagttactggacttgaatcttagtataattaacgtaattagtatttcttcgaggcagtcgacatactatataataaatctatattttacggattggaatttgtaattcaaatgtggtgtgttaattttttacggattggaatttgtgtcacgtcttgggttttaatttacagcatgtctctgatggtctttatgggaggcatctacatgtatacagctggactggggtgaactgagacaaacattggaccttggtgagtcagggcttctaccctgggaggtacattgtttaatatataaatctggaattatttccaccagttataatgcactttatgtttttttttttttttttttgctgtaattgaagctattatgttaatgtacttgtgatttaatcataaatatgtttgtcctttgctacattttttctctctagcttgttcttgtgaagtattatgtgaaaggtgagataatttgtaagcaacttgtcctaaatgcaggtaaggtttctgcatgatccttctaaagatacaggtttcgttgggtgtgcattgtcaagtaacatggtacgctttttcaagactgaggatgaatcatggagtcatgaggcacataaaaagtatatagtaaaaaattaatccctaaattataggagaatcacaacatctcattaatcggaaggtttacattcagctattctatttttatttcattcctgtaattttgggattcctagttcttgaaatatcctatttatcatttcctttttttttcttcattttttctatatattgtatcggtgctcatatgaaataatagagactatataattttcttcataatctactctattcatagatatccatactgattttgtatagtcgtgtggttagtgtttgtgcagcttcaaccaacgcataatgatcaataatacttacagactagactgactttgcaggttgcaatatcagtgaaaccattgaaagtgcaaaactggattcttccagaaatgcctgggcttataactgattttctgatatctctcaatgatcggtttctgtactttgtgaattggcttcatggtgatataagacaatataacattgagggccctaaaaatcctgtactgactggccaagtatgggttgggggactacttcagaaagaaagccctatagtagctataactgaagatggtaatacttggcaatctgatgttccagacatcctggttagtgcagtttaacttttgaattagtgattctagtgttatgcttcttgcatctcacatgtttggagttgattggttcttagatgtagtagatataatagacgtgcattacattggtgccttaaatttttggtcacttttgtattttatcttatgtgatgcttaaacgtggtaaataattacacttataattttgacctttttgtggtctaaggtgaagagatcaaaaattgtaattttcagggaaataagttgagagctggccctcagatgattctgttgagttcggatggtaagcggctatatgttacaaactcactcttcagtgcatgggataaacaattttatccagagcttgtagagaaaggatcccacatgttacagattgatgttgatactgaaaatggaggtctgaaaattaaccctaacttctttgttgactttggagctgagcctcaaggtccctgccttgcacatgagatgagatatcctggtggtgactgcacttcagatatatggatgtgatagctatgccacttgaggccaggctacaagcaatatccatgtgaataaattccttagtccaagaatgaatagaggtgggctaatgttataaataaataatagttgcatatgtatgatgcttgcattgtaataaagttatattttcatgtagttttcagtactttctcatttacatcttcctaaacagaattctctgtaaaataaatcttgctcacctccaaaacttgggtctcctgatcgagtaaatctattagagtaacattctagattaatggccttaattgggattctatgattttcattcaaatcatgaatgtgctgcaccttctacgttgcttgttcccatttgaatgcatttgaaatcacaacccaaccaaatcatttcgttgtgaattgtgattgtcagatggtaacttgtagggcgccttggtcatttatgtgtttttgtagactgtaatgattcattctaattaggactccacctattttgaaaatgactggctcatttggattgacttttgaaaagaacctctgtttgctaataagtggaatcatctataagcttataacagttatgtcaacaataccatcacttaaacgccaaagttaaaataaatgagattgaacaacattattatagaatcaactttctagtttctagagaaaagttctgtgcaaaaattagttgaaggtgaacctattccttatgccttattccgtgaccaccaccaatggttctcatttctcatttttcaagttttagcactataaatggacagacttaactccaaaatcagtaccagaaaatgtaatgatttgtgaggaatgaagcagtaagcttatgtgaagggttgaaatggagtcttaaaatcatgctaaaaatgcaaacaagtacattattatggaagttaccaagcgcaacatagcaccatgtagcaaaaactgcttaccgccagcatcaaatccttacaacagaggatgctccaggataggcaacagcagaaattgaagtcttcagtccgttcaatgggaagaataaggaaatcatatactatgatgagtgctttcttggccatgcgtgttgttttggcttctgctttgtaaacacaagacaataatacaggatcaaataataaactgtataatgacatgaagttcaatatctttctttgaagctaagaaaaattgttatggcatgtatctacttttgttgtcccacaattgtgtggcatggagtaatttttgcatatattcgtaatatttattttgtgaactcgatagtctacatctattttatgaagtgtagtgaatccaacatcaaacccctttggcccactgtacaaaaaaactctgatcatttgaacctgataaatgcatacaaactgggtccataaacaaaaattgttgtgtcctacgtgcaaaaaaaaaaaaacttcactacccccattttgtttttatcatgttaaatatatgaaaaaaaattattgccaggtccaaattgcttgcaactattgaagcctgtatttgtcttgatattaaataggagtacttatccaaacacagtatcagtttgaaacaaactagttcatactattgataggaaatgcttccaagaatgctatgcaaggtgtgaagattcaaacctgtgcagtgtgtgccactttgtgtaattaaactaaaataatagaggaagaaattaagtaaatgcttggaaccatccttggctttacaatttccatgagtgcaataatttgagattggtgtgaaaggaactcaaagtcattgtcctcgttttattagagtcaaaggaaatcccgaaatccatagcccatagggaccccaccacaattgtatgttgaggtccattgtctgatagaagactgagagtttaggtggggcaacttcgaggaatatgtaccaaatattttagatgtatgattatatcaacacacaccttagcttctgttctctcctttttcttttgtcatgataacacccttcctataatcctatttacctaactccacatttgttcatttatactttcttaaatgtgtgtaaggattttcaaataagaaacttaaggtggcaattgattgatttgagtgttttttgtttttatttttaaagaaaataaaaaataagtgaaaatatatttgtttaaaatttagaaaatattttttctaaaaatatttttaaaaataatccaaaactgaaaacaacaaattaatatttttagtctcttttaaaaaagtgaaaatgtgatgacactttaaagtatttttttttcaaatacatattttctaaatctggtaaatttgaaaaaaaaatattttgaaaaaataaaactaaaaaataaacactcaaatcaaatatcaccttatctcattatttttggcttcccttttgcaaattttttcttatgaatagattttacccagggaacaaaactaggaaccaaaaaaatatcatcatattcaaatgccacaaaaccaaccacatgttttctataaatattttttcattttggggtactattatttggtatggaatttttaattagtctatttatagtatacagaatacttgggacatattagaattttatcttccgagagcaactcagttatctcatacatatgcaatcacttattagcagagtaaatcaatagtcttcacagaaaagaaagaaagaaaaacatctgtagcacatggcaaataacataatttccatgttgtccaaaacaaaaggtttggtgaagtgcgctccaacagcttatcactaatgcaacttgcaccttttcaaaaaggtggtgtcatatgatctaatattatctatatagtgcttattagtgggagagtggagggaagagtacatccaagagacaacagaagaatggcctcaaaatcatccaccgttagacttctttgtttctgctacttcatgctcttcagctttatgcatttcagcagctgcactgtgctctcattgataagtcatgcaagcacatgcaatggttccatagctgaatgcaatcaagaagatgagctgttgatggagtccgaaataagccgaaggtttttggagcagaagagatcatacatttccaatggagctttacagagagataaaccagtttgtaatggtggtggctctggtgaagcttatagtaaaactggagggtgtcttcctccaccctcaaatcctcaaaatagaggctgctctaagtattatcgttgtaggtctgactcttgattgcatcttcatgcaaacatctttaaggtttaaggttgttcatgaatcatgcctgttcacataatctttaagttgtccattaaatttgatgggaatttagttttgaatttgaaattatatgaaaatttccaaaaggttctctaataactaatactgtgaatgaagaattcttattctgtgaccgtaggtaatcaattctgaataagtgaatattaagtgcaatagcgaaagatcaactgctgtgattgtatcaataatcttttttctttttatctcccaactctttctttgttccattatgctagatggaatttgatttttcttctactttgtgggggggggtatttgtaatgcttataagacaaccataagctacaatgccatacggagtagactttgcaatgttataaacgtagacatcacccatcaattgcaatatacactccttaaaaaaaatatgtggaatatatatatnacatcacccatcaattgcaatatacactccttaaaaaaaatatgtggaatatatatatatatatatatgataagtgaatagaatatgaagcttttaattacaaataaaatgcgaaaatgattcagtaattgtcaagaatctgataactaacagaacattgaaacatgttacagaagccatacgcagcatgtaccataatgataagtggtgctcgaatataacgaatctaaacatatatgaataattcagcaactcaccttttccagaaagacacatgaacaaactcgcagcaacaacagcagtcaacgcactctcttgagaaaatttgatgtaaaaaatgagtgataaaaatgtatttatatttttacctaaatattattttccaatttttttattatttatttgcctcatgcaactcagtgaataaaaagtgttcaagccagtggaagatatattccgttcctcttcttatcttatttggctcaaatgtattttggatcttttatgctgtgatttctcaaatttgttcccctcattcttttttcacaaatttggtcatttaattattttaattgtgcaattttaatttatctattaatttgacattcaataattagcaaaaacatcaatgtgacgcttctgcacatccacttcagcaaatatcagattaacggatgaaattatacaagttaaattgtaggatcaaattgacaagaaaaaatggaaaccagatttaagaaatgaaaataataagagaccaaagtgtaatttatttcaatttgtcccttcactctttgatttatgatgcggattcgataaaatacgcccttctctcttgaactttgctcttttaaaaaattattctggatggacctcatatttaacttattagattatatatagcccaaaaaaattactctaatattttttggattaatataaatatgatttaatttgtcaaaaaactcctataaacaaacaagcagcgggttgaataaataactttcaatatgcccctttgttcagctagaagattatccaaacatggaagtttatgctacatttactagtgaactagtacaccaattgacaccatcaattcagtgtcactctcgtctcgggagttccagtcagtatcgaagttgcacatataaatgatcttagattgaaaaacagtggctcctaaagcatcaacataggcagcaatctcaattaaatcctcatagccagccagtaaaagtcaaaatgatgacaaaacaaagaaaggaagtcatagtcattaggctgggctggcaggactctaaatcagctatgattcattaactggggaagaatatccagataaactagcgccgaattcctgtcacaattgccttccatggtccacaacatacacgctccagccgtgatgaactactttacgttctgtttaagacagaacacaatcatacataggacaaggacatatctactctggtatttctccaaagtctaataactgaaaggatgatatcttcatgcatacttttgtaacttcaagttcatcgagattcccaatcctttaatttcctgcttcctttaggtttcactataggtgcgttcattgctgccattttgtcattatactttgcacgaagtggatcattgtaagtccacctgcattacaattcaacaataacaagaacatcagagcataatattgcagcagtcaatatataagcataaaaggctcattgcagtagtactaaagaaacccttttttcaggggaaggggttagttgcacattaagaaaattgaattcctatcatcaatgcattaacgaactccaaattcttggcaagggagatagatagatccgacacaagaaaagtaagatgcagaaagccaatgcaaaaatttctttcataatgcagagaatgctacctaaacatactaaaccccattattccaaagatgattatcaatatgtgatagcatgactgcaagcctatcaacccacaatgcatgataaaatccaggtgtgataaaaaaattgtgtagactcttttgttgtaataaaatcagaagaatggcagaatcaatttaacaagttacatcaacatccaacacaaacagaatcaatcataaaagtagtatttcagatgttctcagaacagagaatataacttaatctataaattaaaatagaatcataacttctatatgttatgttatcctctcaacttcacaaattacaagcaagcaaatgacaaaagtgaaacccaaaagtactatgaaaacaaataagcataactcatgagcatgcacttgtgtcaagatctcaaaccatatcaagggctgctaatatgcaactcgtttaaattgtgacatgcaatataatcccttcttactgtccagctaaattcacatagaaggtgaggttgtcaggtgaagttgagaaactaagaaagttgtaaacaataaacttcaagccaagtacatatttctacaaaatgaatgccaaaaaaataaaataggatttgtgagatggcataactatgcttactctaaatgaaacatgtcttttaactatattccttcctatcaactctccctctttctcaatctcacccacaatcaaattccttaaaaagcaaaatgataggtaccagcaagctagaaagactaaaacaaagaaattaagcatacaaatatttgtattccagtaacaggtcttaatcaatggagttcagatcctggtatcttctgtgtagaatggtacaaaatgaaaaaagattcctagacagtttcgagagtgtgtggtctctcccagcccaagcctaattccagcctaccttctacacacccttctcaggctaatattctctctctccttagaacaagcccacatgccctcctcccatgctcagctacagggttggcagttggttatatctctcctaaaattgatcatgtgaaccttttgcctatccttacatacaccttagtgatcttgggccttggggcctccatcacaaaaccgttcttcttaaaaatactcatctcattcttctgacgacaaatagcagcaaatattttgacatgagcatctcaatttcattccatgaacataaaagtaatgtccaagaccattttggaccagtgccacagcagatgaacttcataagtaaatatgaacagatatgccaaaaaaaaaattctcaggataaaacaacaaagatctaataccaaagaatagaacaaacaatctaccactattcttgaaagatatagaacataggagaaattgaacttacggattattccaatcagtagtatcctcgttgacaagatgggtccacttggttcttccactacgaccaaagtgcttgacttgcataaccttgggtaatattgtcttgtccattttatcctccccagttggggcagagaaatcacgagcaaaaataccatcagatccaacagtggcagctcggtcatcagattcattctggaagaaagcgcctttgtgataatatttctgcataaatctccacttctgctttggtggtggagcaggttttggattcctcctttcccactccctcctctcttcctctgtcatgtttctcaccttctcaatctcttccttttccttcaacattgcctcccgatcttccctatccctcttgatcctaccaatctctctccctttccaagcttcatattcttctgcctcattgacttcatcatcagtatccacatcagcaatgttggcctccatttccaagtttttctggatttcttcatcctttcggatctcctcaacaacaatctgcttcgtctcaatcctccgttcctccaatctccttttccttttatcctcgagagccagctcctcagcctcaagacgctcacgctccgcgatggtatctctctcggacttgggaacaaacacaggcttcaccatagccactcccgtatattcctcatcggagtcagtctcgtactcagattcctcctcctcctcctcttcttcttcctcctcttcctcttcctgaggaagtgcctcttcctgctctctttgaagcaacttctctttaatcagcctccttctttccgccagagcgttctcatcttcttcttcaaactccaaccattcctgcctcctggcctcctcttcaatggtggaaacaatttcagcctggcgaatgcggcgatgatcagctcggacctcctcacggttatctatccggctctcagccaaacggcggagcctacgatcatcttttctgacaatagcagcatcttcttcgtgacgaggaaatgctttttccagggcagcttccctggaaggtctaatatcggcgggggcagcatcttcgttctcatcatcagcccattcaggaactttaccaggccaataacgcttaactttagtttggccaattttacctctgagcttatccctaactgctatcacagtatcactaacacccgctgtcaccgacatcgttcttactcaattgattttcgattcccttcaatgccaaaccctattttacacaacacagcaacagatgatttcagattaaatgaaaagcaaaataaataaataaatgaatgaagaaacacagaaagatcaatggtgaatgataaaattcgatatgcgaaacattcgaagggtttgggttcaaaagactaacagttgaatagaagaaagggacgagagaagtttgaaggacttacgattacagcgaccggaaggaaccctcgcgtcgcccaaacccagcttctcctatcaaatttattttattaaatctgcaaatttttatttgtttgctttaatatgtttgctacttaaatatttttattttatactatgtaaatgacatgtttatacgaatattatgtttttattaactgttaactgataataataatattttttaaaattaaatatataaactctaacgctattaaaaatattgaaggaatatcatatttatttaaattttatattttggaattgtatataagatataacataaaatacatttaactttccccatttcctaacctaaagggttagtttattagttaaattaatatttttaaattttagcatattattaactaatatatattcatttgtttatcatacaagataaatattatttttgtatagttaaaatataatccttattatttttatttaggagtaaaaaaatattcactaagcagtgtattttgaaaaaatacgtcaatgaccaatctatcttttttcagctttttgtttatttgaacataagcataattactaagttttaatttcttattaaaaacaaaacacaatttgtccgcattttatttgattttcgttttatactactactaataataataataacaacaataatattaatattgtaccttattaacggttcaaaatcctaaaccagcctcctgacaaaaaaacctaaacccttgccagattctgcaaccaacaacggttgcagcaagttgtttccgacactgatggtgttcggaagcaaaagagtgagtttttaatgcttcgaagagtaccctctttctctcgttttcgtcttcttcatcacatgatgggtactttctctcattccatttccatccactctccttcttcttctctgtctttttcaaagcactgtcattgctccacaaacactgatgacactgagagccatagcaacggaacccagttcttgatttccatgagaaacctatgcaggtcagataaattgaagaatattgatgaagctttggacttgttccacggcatgtctagaatgaagcctttgccttctgtgaaggactttactttgttgttgggtgttattgtgaggttgaagcattacaccactgccatctctttagttaagcacatgttttcttctctaggcatagaagctgataccattactcttaatgtagtgatcaattgtctttgccgtttgaagttggttgcttttgggttctctgtgttggggactatgttcaaacttggtttggagcccactgtgatgactctcaccactctcattaacgggctttgtgtgcagggcaatgtggctcaggctgtgggactggctgatcatatggagaaaatggggtatccattggatgtttacacatatggggcgttgattaatgggttgtgtaagacgggagacactttggcggcggtaggttggctaagggagatggatgaaaggaattggaaacctaatgtggtggtttacagcacaattatggatggtttgtgcaaggatggattattatctgaggcgttgaatttgtgctcagaaatgaatggaaaaggtgttcgacctaatttggtcacttacgcttgcttgattcaaggtctttgcaattttggaagatggaaagcggtgggttctctgctggatgagatgatgaaaatgggaatgaggccggatttgcaaacgctcaatattttagttgatgctttctgcaaagaaggaaaagtgatgcaggctaaaagtgtgattggttttatgattctgactggggaagggccggatgtcttcacctataattcattgattcatatatattgtttgcaaaataaaatgaatgaggccatgagagtatttcatttaatggttagcaggggccgtttaccggacattgtggtttttacttcacttatccatggatggtgtaaggacaaaaacattaataaggctatgcatctgttggaggaaatgagtaagatgggatttgttcctgatgttgtcacttggaccactcttataggtggtttttgtcaagcaggtagaccattagctgcaaaagaactgttttttaatatgcacaaatatggtcaagtccccaatctccagacttgtgctgttatattggatggcctatgtaaagaaaatcttctttctgaggccgtgtcattggctgaggcaatggagaagagtaatttggatcttaatattgtaatttatagtattttgcttgacggaatgtgcagtgctggaaaaatgaatgctgcatgggaactcttttctggtttgcctggtaaaggtttgcaaattaacgtttatacttataccattatgattaagggtctctgtaaacaaggctcgttggataaagctgaagacttactgataaatatggaagtgaatggctgccagccaaataactgcacttacaatgtctttgtccaaggcttgctgacaaaaaaggagattgcaaggtcaataaaataccttacaataatgagagacaaagggttttcagtagatgctgctaccacagaaattattatcaactacttatctactaatgaaggagacaccagaattcgagaatttttgtttccagaaagatagcaaatgccaagagtttcactaggacatttattcaaatcctgactctcaatttgtccatgttccacaatcctataggaccccatagagagaactggcataggcttcagaacttaccatttgttaaatatataaaaccattaccattaagtgcttccacctgacaatttgtgtgattaggagagttggtccttaacatggtatcacaagcctcataaataagaaattatgagattgatccttgttgattctcttcttcataattaacttgtatttgagccccaaggtaaagtgggtttgtgcattgtccacacttcaaactcaaaaagctctgtttaagggggtgttagatataaatctttcttagctccaccaaacagcttaagctgtcaagagaattgttccttgacatttttagtggtaagtattttcacctctgcttgcacatttattttgataaaacctcaagttattaaaatagcttagaaaaaatagtcctatatacaacttagaaattgtgccatatccttgcacttttatggaactgagtaattttttaccaattatatatttgccttcaagtaagtttaatgatgaagcaagttacattaggatattttgtttccccataacattagggataagtcaatcaatattgctaggaaatgataattgtcagcataaattctgccagggcaaattcaatatacccaagaaatcatgtaattgcttattgcttagttttatacatttatcaaatggattccattaatgtaaaaacatttaataagatcataagctggttttaaaacttaatccttttccagctactggtattaaaattaataaatttcaactatgaaggtacaccttattaagttaaatggaaaagatctcatcttctggtctgatataccgtatagaaggggaacttctggggagcacccaagaattttctgtttcatagaaactcctcactcaaaaatactgtagtgtgagctagtgttcagtagcttccttttatcatagatatctctttggagccaatgttattttatattttgtttcctttcttgtgtattttacttttctgtttcaggaggattcctgatacttctgcactgtactcctttctctcctagttcattgtttgtgatgggaaaaattttccatatttattacctgttagaaaacaaaaatctaagatctaatttagcgatgctagctgtcctctctgcaaacaaatttttatttacttttgacagttttccccccttttaaaataacagtttgacttcatggttcttgatttgcagattgaaatcactttatgcactcgttttgctatatcttatgtacgagggaggaccacaaataattcagcgatggatcatggaaggttagtcaaacatttcttctttgtaatatctgcacaacattttttttgtaattcgaatttctttaccataagtagttttgtttgaaactttgaatattcatctctttaagttataaattcacttctttttttctttctatggctgcagactaggttatcattacacaggtaagtcacaaactctcagttgaatgttttatgggggcgactagatggtttgctcatcaagcaatgatgctcattagattggttactgggttttgagacgtaaatgctgattctgccgaatggtttagtgatagaatgaagttgtgatcatgtcttcttgaaagttctttcatgtcgttcttttgtctataaccaaaatattcaatatgttgggcacttgtcatattaagtgaggggtaatttgtaaattttattgggttgcagccttgtgcccaatgcttcatattttgcttcaatgtaaagctaaaaatggttcaaatgtgccaaggaacagtagtccttgacagtgagatgacactggttttagtggtttagcatttaaatgagatttcaacaatatctggttttgtgaaacattttttcagcttttaatcttgttttctgaacattttattagttgccacttgccatagattatatgtggatggatctattcgactggaacattagtgcctcaaaattagaggtatatttggacgacaaaattgtttttggcaaatgatttggcaatcaaaaagcactttgcattctcaacttgatatgcatcaaaatgcttaatattatgacttggttataatgatatctattgaaacatctaagcagatgttgggtaaggtacatggccactcctgcatggttggtgtacccatactaggtacatttactgtactgatacacgggtctgcacagacacttgatttcttttaatatgaattgtgttgtggatatgtttgcgtacgcattggttatgcatcacgttgtctgttgaaaaagtgtatgctatgcatttaatcagcattgagattaacataatactgcacacaaatcatgatagacatatatgataaatgagctgccttatattgatgttttggttatatcctattgtcccctgcctccatttgactgattcttagtgaacaatacaatatgtgtggggtaatggtttttgtaaaacaaccaactcctaggcccgttcatttgaggaaataaagaacgaaaaagaaaaataaatgaacactaaaataaggtgaaattcacacttttaaatcttactttaattcaaaattttaattttaatttactttttttttccactctaccgaacacacccttactctattcggtgaaattgtctacatggatcaagtgcactatagggctctagcaatatccttattttcagtaaaacaatatagagcgtagccttttttaatgggttcccctaatattttcttttgtccccctgctccttttaattgaactatcctccatttgatgggttcagctcttttccagcacttcagaggaaatttccccccatttgatccacttttaaatactatactaattacatttttagtttactcggtaatcacatttttcatcagaatgttttcaagaatattcttcaaaatataattaattacactttgaaataaacatctacgttaaatcacattctgaaagataatttttttaaaattgttttcaagaactgctaaagaaattgactgcaaaataagcaaattattaatcttaaattgaaacaaccctccaaacttttatgtttaacaaaacaatcgttcaacacgattacaagaatttacaccactactaaaattattcaaggaaacaacaccgtctatagtatttactctcaactagttagactatatatcaccagttattttcattttgtgtatttcaagatttactcatcaaatgaattgactgggagatggatgacacaaaaatatatttatctcataataatgctttgccttttacaatctttccctcacaaaattgttttctttaaataaaaaataacttttacaatatttagcttgactccaatcttaaccaaagcagctttaaaaatttacactaaccttcgagtattttaatcccattgtttaagctgtaaagtatcaagcaaaagtacaccatattaggctaatcaatgtaaaggtacaaagctccagtcagattttgaactaggcagatgactaatatgaaaccaatattcccaatataaatagcactcatttagtacagtaatacaacccggagaagtggggtcccatggtgaggatttcagacaacagaaagctaaaagcacaaagaaagtaattctaagaaaccctccattggcaactaaaactagaatcggtattcaatcagtccccacttgcacaacccttgcatccgcagtgaacacactctatgaccttctcctccctaagttgcttgggaactctgcaaacacaagtagtggcaaaattgtgatcacgtggctgcatgcacctcaggcagcaaagacgttcataaccaggctgcaattcagaccaaaaacataatgatttaagtactcaaaatccaagaaaacacagaatgcacaaatcaaataaaatcttagtgacagtaaaacaatacctatttctttaacgtttttagctaccaagtaacaataaccttacaacaattaacatctcggagaaggcacaaatgagtacagaaataacatactttctaatttcaccagtactcaatatcagacagacaatgtgagttcagattgacccaaagacacaaaacattgatcagctgtgggtaaacagagaagagaacattctttttgggacttgggaggtttgtcataggcctaaaatgaagggggttaggggttgataatttggcatcttaacacagaaacattgctttcagaggttaaatgactttggcactttcctttggagactaatgccaaaagaggcaacaactcaccaagcatataagagcaagtacaacccccaccagaacaggtgggatgctgaccaagtaagcaacactgctcatattagattttggaattggaagattattttccaggaatacacttctaatgtttgggtgatggtatggtataatggtatctttgtcaagttttgagaggaagttgagatggggagtgctcctatttcagagacttttcctgcatgtttcaactatctactttgctcattagccatttctaattaaggctaagaatccaagatcattatttacatagggactttaatttacttaagagatttgaatatgggtgatatagtgaactacaatcccttttggttttaaactttttacttgagtctctttctccctcaactaagttagatagaagagtttggatcatggactcttccagtattttctcctgcagagctttctttcaatttcatacacaccctaacctagtttctacttgataaatccattttaaaattcaaacctgtcttcaaaagccatgtcctttgttaggacagtggtacttaacatgattaatgcaaatgatttgttgcaaattcacaatagacctttcacgcagcttttggctcattttattgaattagtcttatttgttttggagaatttcttttattttttggtaactagcagattttttgagaacttcctcctacgttaaaagaaatggaaaaacaaaaccagtttcaaaagtagaataaaataactaattttagataccttcttccattttgcaattagattgcggtccgcatatccttgatctaaacagaattcatacagttctttagaaatttccttcctccgatggtagaggtcaaatatgtagcggctcttctggtgtgcaatcttaaatataggccataacgtctcgcattttcttttgccatcatgtggatcattctcagctgccacataaaggatataaaactattgatttcattgatttcagcaagaacgtaataaaatctactaagcacatgatgtaaaattccaaccttccctcatctttgcttgaagttcacggagtgtaggctcaattaattcccagccctctgggtatttaacacgatttgtctttactttcggcatttttgtatctgttcaaggaatacatggcatcaaagagtcaatttccatacattctcccaagcaatataatggtacatattatttggtacacgttatcaagtaagcatggttatcatagtgagatgggcaatattctgaatttttatatatagattaaataatttatctgtacaatatacatttaacgctcaaagtttaaatgacaaacatcaacattcatgatatattcattaataataaaaggtcataggttttaagcaaaacatacaatacaagtcaaggaaacaaacaaaattgaaaggcacgttcatatttcaaatacaaggcatcttaaacattcaataaaaagtgagggtgggtgttgcacagataaaagaacagaggttcagagttcaaaggagaaaaatatggaaggtgagtgttggcagaaatactgccagagatgcaccgaagttagtcaaatagtgagtgtcacacggtagataaaagcgagagaaactatatccaattagggatttttaaattctaaagaaggggaggcaaatctcaactgtgcactaagaacacacccttaaccgaaaaactacgctgttttgtgggcaaaaatgggtttagaaagaagcatcaatctagcgccacttatcaccgctagagccactattttggccgtgattgcagccactacagcgctattcaaaactttacagtggccactttgcactgctatagtgcgctattgatgcagatattggataactgagcaaaacagaacactctatgccttgacttggttgaaatttcacataaaaaaggtgaaattaattttgaagaaaaccctaagccacagcattcaaccatataaataacattgcgaggctagggcacgaagccatgaacgaggggaagagaaactcagtcacaattcacaaactgtgaaaaacaaaacgaatggcttaattcactgggcaggctatagttattcatgaaaatgtagataggaacactcctaaaccaaatttgattgaatttcacatcaaatacgtgaaactaattttgaagaaaaccctaagctgcaacattaaaccatataaataaaattagggcaaaaaaccaatgatgcgaccactatgccgatttcgctctactctgtgactcgattctgaagataggtagagagaaaccaaataataagataaaacgaaaatcaaaggagtaaacttgaaatatttgaaaaggaagaaagaacctacctcagaaagattttcaagaagcgaaagagcgcaggctgaagagaactgatttagagttattctggaagtttcacgctactgaaataatccccacgtgtgtaagacgatgaatgaaaatttaaagacttaaacataattctcgtgtctcatgaaaatatttttattttttattttgaaaaaattgtttgaaaatgaggaaaatatcatattttttaaaatcctacaaatatacgagataaatataattatttaattatataaattaaatcactttaacatgtatttttaataaatcaaattaatatatacaaatattttaatttactttaaattttaaaaaaatagtatttcatagaatttaaaataaattaagatttattttgaaaataataacatacttataactagtattttagtttgtacaatgtataagttactcattattttatataactaaaacttataaggaataaaaacttttgaatataaaaattatatcataattaaaaaattaataaataaatacttctaaacatataattatgttttagatttacactaaatgatttatattgtgaaaaagttatttttaacaattgataacttcttttaacaaaatataaaaattcaattttaaaaaatattaacaataaaattgaaaaagataagaaattaagaaaagttgttagaagaaatgggagatgaagttttgagatgaaggaatgtgacagagatggatagccagacaaaattaagaaaatagagtcttgagacgacaaaatgagaccaatgtgggtagtaaaaaaaattaggtgttacttaattttttttaatttaaaatagaattaagtttatgctactggttattacacatcagtgtaaaaatgttctgtactaataatgcatataccatttattcatatattatatattaaaataaagtaatatttttattcgtgttaaaatgcagtaatagaataaagtttcaattatttttaaattagattagttttggaaaatcaatttaactaaatgatatgaaatatgttcttacagatatcaactgatatggacttttatctttttaaaataataaatgaatcatatttataaaaaaaatctttctatcactaaaattttcggaatatgtcatttttatgttttttttccatgtgtattcatggttcatttaaaaggaaggattaagcagtaggtaatatgaatttttttaatctataataatttaataaccattcaggacaacccctttatttctttttatctattctccatttacctttattcgtttatctcgcacgagcccacttcctagtttactgtatatgaatgtcgttataatgttgtgtcatttgtaagacattttaaaatattaaatcttattaattattttaaatttatatttatatgaataatatgattttttatttaatctttctagaaaaatcttatcgtacctacttctaggcatggcaacgggggtggtcgggggcgatttttgcttataccgcccccgcccctaaaaccccaccctcgccctcacccacgaaaatcgaagggtcagaaatttgtcccccgcccctgacggggatcaatttccccgcctccgcccatcttactttctctagtttgtttcttctacttcgtctatatttgtatggattcatcatagaaaaaataagtaaccaccagaaatactgaatttatcccgaaccaacaaaataatatatatatataaataaaatcaaatataagtatttcatgttacgtgtaattttagaattaatatataataattaatttgttatacaaaaagtttgatattttatattaatattgatatgtatcattaaatgtataaattaattaatatgaaaacttaataacagtcttaagtttgattttcagatatatagatttgttaaatatttgaacataattatcctcaatagaatttacgtgaagtttgaaacaaaatataaataatatgatatatcattaattacactattgaatatataatagtataaaataattttacttctttattaaatctttttcattattttgtttttttctcctcgattattttggctaaattctcatattaaacattatcgttcttgatatgaaataattgaataacaatacaaaatgcatgcctacaaacacaaattccttcccccaacagaagttaaaagaacaaaaattaagagtttaatttttatatacatttaattaatataaaattttatatacatttaattaatataaaattttatagatttcaactaattaaaattatccttaaattttatatattttaagttctttattatgatagttaatcaaattatcagactcgatatatataaatgataagtttaaaaaaattatattgttaaaacaatcaaattaaattaaaatttaactaaattattattatgcataataaatagtaacaaaggtttaaacgaatatcattattatttgtgttactataggacaaataggtgcgggacgggggcgaggcggatgtcaacattaccaaaaccgtccctgcccctgaattcagcatgcagagaaaaatcgaatccgaaccagaaactgataaactcgatttttttccgttaaaatcgggacgggtgcgggccaatgcgggtggggacgggtgaagttgtcatgcctacctactccctacttttacatttaaaaaactcatcatattctttttctgataaatttgctattaaggagtatttaattttttaaattacttattggggaccatttttaaaaatttatcaaaaaaaagagtaagtcataatattttttacgacttctgttattttttattttcttgcgtcaaagttgtaaatagttagtataaattttttttaagtgataaaattgtgcacaacgttaagcctttttgttaattacttttttaaaaaaaaattgtgttgaagtggtacattgtgttatgaccattctattgttttttctatttgaagtagtaagttggtgtactatttcctttcttcttctttttttaaattctgttttattatgttttttattttataaaaatttatgtttattttttaatttatagtttcttaatttatgttaaaaataatatttttaatataaaattaacaaattaaaatatgtatttttttgtgattttgtattttgtatatcttagttaaatgttttaatttaatatataatattttttatgtaatatcattatgattttttatatggtttgatggtattttgtatatttaatgttggctatatgattttattaaaaattatttatatttactagtaatgttaagatatgtctttgataaaattaaatttaaaggaaaatatttaaatatttttttatattaacttataatatatcaaataatttttaattatattttgattttgttcattaatttataattatgattaagaaaattaaatatctcaaatactagtacgttaattttttgtaatagctatttaaatatcataaaaagaataatgcaaaatattatacatataaatatttttaaatattattaaaaaaataatgcaatagttatttatcaaatacatatcttaacattattaataaatataaatattttttaataaaatcatatagccaaaattaaatatacaaaataccattaaaccatataaaaaatcatatttatattacataaacaaatattatacattaaattaaaatatttaaataatatatacaaaatataaaatcacaaaaaaataataaatattttaatttgttaattttatattaaaaannnnnnnnnnaataacaacatatcatttgttagttattctaaaactaaaatgtatttttatcccttcttatggtgtgaaaaagtattaaatactatattaataagaattttttaagacttataaaattttaaataattattatatcttttatgaatagtatatgatttacaaatgttgcatacaaagtttttaaagtgaagtaattaaatattgatcttttcaatatcttaaaatattaattcttgacatgtatatatagatggatagataaataaataggttaaaaagaagacatacaaatcattgactcaacaaatatatttatacattcaaacatctaattactagcaacttatttaatatagtatattgttgatatgctctaagcatagtaatatataacatagaaatcacactaaaaagagggaacaattagttagagcagcaaatgttgtaaagaaactatttgcaaaacagttatttgcaattaaattaaactcacttctnnnnnnnnnnggaagaagtacactaacttactacttcaaataataaaaaaaaaaacaatagaatgatcataccacaatgtacgacttcaactcaaacatttttttttaaaagcaattaataaagtcgtaacattgtgcacaattttatcacttttaaaaagttttacacaaaagtcgaatgattaattacggctttgactcaggaaaataaaaaataacaaacatttgtaaaaagtattacgacttcgattttcaaaagttgtaatattttttatgactttatcactataatttttttaaaaacagtccccaatcaataatttaaaaaattaaataccctgaatagtaaatttgccaaaatcttcactctcaatcgttcaacgctttcttcataaacctctctttctctccctcttgagtcttccctttgtgagtcccaggattttacttacaaaaatcttgttagttttgtttcaacaaatgtttagaggatatgttaaatcttaaagggcttatgcactacgttgataagtctttaaaacaatacgatatcactcaccttagactattttatttgtgattaagagcacgtttgatttgtcatttttttcttataatacatattttaagatatatcaaacggttcaacggagaagtaatactttgatgcgttggcaaacctatgtttggggctttctaccacattttcaaacatgcactaattgagtttgtgattgcttcaagattgatgattttggtctactacaacaacaattttaagaacttaaggtaggatcctaatcccgaccactttaaaatccattaatttattaattaattttttccccaatctttttttttatttgctcaatgataatgaatgtcaaattagtgactatgggattgttgttgttccattttcagcgttttttaaattattttagaggttttgaacatgattttagagttgtcattgtgttgtgtaaaactttgtggcaacttcgtgtgattaaatgtgtgttaggatgtggaacattgtgtgactaaaatttaggtgtttagagaatttgataaaaaaagacctattaaaatgctttgatttgagtagagcgagagaaagactatgtcaatatgtttgagttttaagttttattttttttttaaagattaacatattttttcttttaagtaatcaagttttataaccattaaatctaattgggaaaacctaaggattctatattctttcaatacctaagcaataaaataaatacttgaatatttttatagtctaaaatattaaaatattatttttcctaagacatatgtgattatgggatatagaagtagtattttacttattagtgcggtggaggtgtatttgcatgcattcttttcggtgtattcaaaaatggatttagacaaccctttgaaaaaacctagagatttagtgctctttcaatatgtcaacgataaaataaatacttgaatatttttctagtctatgacatatgtgattatgggatacaagagtagtattttactnnnnnnnnnnaaatcttaaaacatccaaaacagttatttgcaactaaacaattaacgtcattatatattactaatgaaaacataagcgttgttttgtttatctgtctggtttttattgtatcaaattattacatattaaatctttgaatcaagtctatttgtattgaatcattcaataaaaaatggattgatcagtttggatcaatgagtaaatatataaaactcgttaatttttcttctcttatccacctataaaaaaccacataaaaaagtaacatgtaaaaataagactataaaaaaaatacaatgaaaaagaaatacatgtatcaagaaaagtaattccattggatcttacaaaatactgtataaaatgcaagaaaattttgtcgtcttcacctgtaaatttcagagataaggatgatacataagtatagaaggcaatattcaaaataaagactgtttgtcaagactgggaggaagcaaaaagatttcatgtagattgaactctctcaatttctttatcctaatgtgcagaagatacgaatgagaagtatgtagaaataatttagtcagaataaaaccatctagagtatgcaaaatgtttttggaaaagtaaaaagaaacactctgattattcttctacgatagtgatgctaagctgatatttcctcctcttgcatgtcattggtatgatgaatagatgttttgcttgattttcaacttcgcctaacaccatttcagcactgtcatttcaccaccgttgctcttcttctatcgttagtagttgaacaaagtattaaaaaaaaaagaaaagagagagaacgaataattaactttagaccatcaaaatgaaaataaaatataattcagaacaaaaacgttcaattaaaatgagatatttcgtttatatattattataaatttcatataaaaatcaactaaacattatttaaatcaaggttaagtttaagaaaaatattatcaacacattatattgaacatactttcttctatatgttaaaatttattaaaaaaattgaaatcttataggtcacataattaatttaataaatatcttttataatttttaataaataataaaactgagtatgttaaagattttttttttgaaaatcctcaaagtgctataaaaaattaaattttcttgctttctcttcaaaattagtgatatttttgcactcctaattcgtcatacttgaatttatcaatatattaaatccaaataattgacccaaataagtaaaattttattatatttatatgtgagaatgatttatttttttaaaaattatttacttttattatatgtaaaattttcttaaatatttgagtatctctaatatagtgagtttgaaagagtctatatgatagtaatacataagagagagaagaaattaaaaagaaaaacaaaaatatattttccaatattccaaggtgggtagcaatcccccaacaacctgcagcaggctacggtagagacggcgttgaagtcaaacaaaaccgctctttctcgctttctctctctaaactgcatagcgtcagcgtagttgcaaattcctggttttcttcctttacccatgatctctctttctctctctcagaggttctagaaagatccattcctaaatggacggtgcgccacaatccgccggtgccggaggtccggcgccgttccttctgaagacctacgacatggtggacgatgcctccaccaacgacatcgtttcgtggagctctaccaacaacagcttcgttgtctggaaccctcccgagttcgctcgcctccttctcccgacctatttcaagcacaacaacttctccagcttcatccgccagctcaatacctacgtacgtttcttcgattcctttgtttcgctgcggttcatgcgctcccttcgtttttattcgattctaattcgttcttcggatttctgtctttcatttagttgtttgcatgtcttgaaatgatcgccggattttactaattttttgtaattgttgttgttggatattagcactgagctgaaatgaaatgttaatgatgatgatgtgagatggagagaatgcatagtgagatagagagaccttcaatggatctcatagagtctatctgaagatatatgttacttaaagttaaagatattgacaaggttgaaacataggtttctttttttggaatgtgaattgggatataggattcagaagtcattgaggaaggtgatcagaataatcttatgctgtgccttgtggtattccttgctcaagtaaagtaccagaaaatttaggcactcagcagaaggtaataagaatctggtagtataggacttagcattcatcagagaaggtttatcgatcttctgcaaccccttgatatatatcacgtactcatgaattaccaaatcaccaaatgtgttccaaagtttttaatcctggtttctgctattctattattgacaagggatgcatgttgaataattatcagaattagaatattaagattcttagtttttatgagtcttacaatgttagcaatcttagtaggctgctagcgagggttgttgtacattaatacttgacctatcttagaaatagtggttggtatctataacaaatgtcaatatagatcattagatctcaataatttctctttctgtcttttttggattcttcttatgcgtttaataccagtcaacttctaatagtaaaaagtataaagcagtttctaaaaacttatatatgcttttcccttggttctccaaaagcgaatttaataccacctaagtttcaggtgtcattagacattagcatgacaatttggcaattttcttatattgtcgtttcgcagagtggtactttttaatgttgtgttttggaaaccattgggaattctaggagcactggagaatattgtatgataaaattaccaaacttgatgaaaaattcatgctagagcattttcggttgttttcatgaataggatttgttactttacctttaaactgtcttcctccaccataaatgtttttctttatccagaaaaaagatggctgatggaggtgcatatgtctattagtaggtcttaacacaaaatagatgcctaataatacataaatactcttcttgggctgtgctattgaactgttgagtgtttatgcacttgatggtttacactcacagttctttattttcagtctaaagcacatattccctggcactttatttgatcaattgataaaaatgctcgattttataatacattttccttaacttcttggttgaaataggtgttataatgatctttttgtgctgatctgatattaaaatgaactgagtttgaaagtgaagatataattactgacaaaggaaaggaaaagagctccagtagacatggttactttgtaaccgttatatttttgtattctcataaccagtttgtatctcatcttaaactggtaccttaacattttgactgaccaacaacgctgctgatctggggttgttactcactactgtaacaattcttttagacttctttggttttaatagaccaaaaaatgactccccaaaaggtaaggctgccaatgttagataactaaagccaaacctattagttccttctcgtaagcaggtttggatgggttttgtcactattcactaaccctaggaccctcccgaaaggcatcacactcaatcacaaattcctttgaaaaatgttgtcaccttaatattggggctgttattgtcacatctttcaagcttcatgataaccttatttcttggtcaaatcagttaaaggtttggccatcttgccattatccttttacaaaatttggtaatttcttgttaaacccaagaacccttgaagcccctttagaattcttgatataggccattctaacactcttgatcatttttgtgtctgtagccaactaggaacccttttccttgagataatatgcccaagatactcaacaaattttctcccaaattgacatttatttttatttgcaactaattcattttcttttaattcacccaatacttctctcatgtaccttatttgagctccccaacccttgctataaaccaagattgtcatcaaagctcatgcctccacagaggtactgattacttgtttcttgataggtgctatttttgtgcttgtagttaaatgctaatgccttagtttcttttatggatattgagtcataaaaggatatttgggctttaattttctgtctttgggaaatgttgttggctatgattactgtgtaggcccattcaggttgcattttgagacctatcacccatgcatattctagagctctgtactattgcagacagtaattaatttcaactttgagtgcaatcaaactctagaaagtttgttgctttctcttgctagaattgcttcctatttcctagatccctatttgtgtgagcctgcgaggctattagtacttttgtgttactggttttttttttattcatgggttgccttggaactttagtcctcaaaatttttccatttactataaaccctgaccataatttcagttctttaatattactttcccacaactcaaacactgcctacttttgctttccagagggtgggtttctttcttgtaaagagtatatacctgtaaggatttaatggtaaattattcaaagaaaattgtagttcttgttgcttgaaaaaaaaattattgtttgtgatcattttttttctttttcttaatacatattttcgagcatttaataaaaccattatttggttttgtttgttttggtctattgatattgctctattatcagggatttcgaaaaatacatccagagcgatgggaatttgctaatgatgagtttctgaaagatcagaagcatcttcttaagaatatacatcgcaggaaacctatccacagtcatagtcatcctccaggttctcttgtagatccagaaagggcagcatttgaggaagaaatagacaaactttcccgtgagaaaacttctcttgaatccaatatttataacttcaaacaacatcagtcaacagcaaagcctaagctagaagattttctgcagcgattagatggtattgagaagaggcagaaacaattgctgaacttctttgagaaggctcttcagaatcctacttttgttgaacatctttcacgcaaaatcgagtccatggatttatctgcatataagaaaaggcgattgcctcaggttgatcacgtgcaaccagttgccgaaagtagcttggtggacagtcatagcaattttagaatggaatttggaaattttttccatcaagatttctcgaataaacttagactggagttgtcacccgctgtttcagatatgaacttggtatcacgtagcacacagagttcaaatgaagatggggaaagcccacagaaaaagctgtctgaagtagaaccaaaaggagtgcagacaagaacagctcttacatttgcacctgaaacattagagcttgcagatactggggcttcttttacttttaagatggattcatgtttatcgcgaagagcaacaactgctgagagctcaaaactgatctctttggagccaagtagtgaagaaggtgatagtttatcctgccaactaaacttaactctggcatcttgtccattgcaagtcaacagaaattcatactcggccagatcaccccaaattgactgccaagaaattggaaaattggcagaatcaagattttttgccaatggtaaagaatctgatagtggtgtttcctcaaacctaaatgtagctgctgaggccaatttagcttcatcccaggaggatccaagtaacaaccaagttaacccagctcctccagacagggtgaatgatgttttctgggaacagtttcttaccgaaaggccaggctgttctgacaatgaagaggcaatatccaactaccgagcaaacccgtatgatgaacaagatgaagggcggtcagctcatggaatctctagaaacattaagaacatggatcaactcacactttgagttattctggcttactgcctgatttatcttgggaaaaatccaaaatccttaccagctttgggggactgatggatacaatgttaattaactggttgacagtgttgtaaatattcaagttctgtttggctttcaaacgtattactataaacttaaaaagtcttgattatggagtttttcttcatgtttgcgcagagagctgtgcagtaagtatttgctggatagatcagctttactttccattacatgatggaattccatctaacacagcatgaaaacatttgttcagaacgcacattgacaacgatattttctctcgctacatacaccgcacgaattacaacggtttatcttcgcttgcaggaatcatatgttgtcttcaaatcatgttagtttcataacttttgctggttgaatattttaagaagccaaatctcccctagctaaaatttcaccgtgggtcacatgattcactcgtgattttaaaacttattccattttacctacttatttgaattttagaaattaccaaatacactctaaactagaaatgtgtctatttctgagtaaccctacttttagtttttgaaattgtaattgtcagtcagtttactctctaatttcacaaaaatttcatttttagttttagattttataaaatgatattcactttaatcttattctgtataaaatgatagtggaaaatatctgaaatgaatgatttttacaaaattggagactaaagtgaagaatttctaaaatcaaagattaacgtgattaatacaatataatacatgaatgattgataatttcttgtttgtcaaattaatatgtacgacgagattagaagccgtttagcagaaaaataaaaaataatggcaaaattagccatagcattacttttcatcattactttcattatttaagaatatgtatcatcatatttaacaatgcattcaatcatcatcaaactcattttaattatcagattcatttttatttttttatcgatcaaagaatcttttaaagtgaatttatatttgaaggttttttttctattcataaatattagttgttaattgttagggacaaaaatgacaaaacaatcaacgatggacctaaaggtaacactcttataaataaaaaatacgttcaatgtcgtctccatttcaggatatttcttccatatatacctcaagagttattgatccaaaaataactcactaattatccagctagacattgttcttctctaaaatagaacacatttaattttcatcaaactcattttcattatcaaattcattttattttattttttatttttttatcgatccaagaatctttcaaagtgaatttgtnnnnnnnnnnnnnnnnnnnnnnnnnnnnnnnnnnnnnnnnnnnnnnnnnnnnnnnnnnnnnnnnnnnnnnnnnnnnnnnnnnnnnnnnnnnnnnnnnnnnnnnnnnnnnnnnnnnnnnnnnnnnnnnnnnnnnnnnnnnnnnnnnnnnnnnnnnnnnnnnnnnnnnnnnnnnnnnnnnnnnnnnnnnnnnnnnnnnnnnnnnnnnnnnnnnnnnnnnnnnnnnnnnnnnnnnnnnnnnnnnnnnnnnnnnnnnnnnnnnnnnnnnnnnnnnnnnnnnnnnnnnnnnnnnnnnnnnnnnnnnnnnnnnnnnnnnnnnnnnnnnnnnnnnnaaagatttttttttctatccataaatattagttgttgattattagtttttattaatagaaaaatcaattccaggatctctctctccctccttttttctctttatcattaaattaaccttataatttcacttagtcatttatattagaatttgtttggttgaaaacacaacctgttttaaattaaatcagaagcaagcacattattgtttgtctactttagacataaatacaatttatacgctttatacatatatacttgaggaaaaattaatatttacgcttcatatgtacattattattggttnnnnnnnnnnattggttttgatttaatcctgtaactttttttttttttgtttcaatttactttttaacctctcatttcctatcacgtttgtcttttcatggcaattttactaaataaaatataaacccaagtcatctaatgaaacttacataaaaatttcttaataataataaatatattaaaggatgtgtcgaaaagaatataattccaccctacttctccacttatatatttatttcatcgcatgatacctttaacataattaactggttgtctaatcgtaaactttgtgcaataaaaacttttaaaaggggattgagaaataaattccttattatttatttaatttgaaatactcctatatatagtagtcttaacatatttaaatttaaagataaatatagttttatttattcacttctaaaaacaattttcattttttattttaccttttgcacgaaaactggagagatagttgtacacagagtctccaatttatgactatccacccactaaggctctcacattcactttcacaaccttaacaacaaactgaaaacaacacagaacagtgtcccaacccagattcattgtcatgactttcccatgtttggcacttgttcttctgcttcacacccttctcccaatctgcaatggcctattagttgtggacctcaatttgagtgaaactgccgtgatgaccaaaagggtttgcaccaaaagcattggagagtgcttggcagagccagaaatggactcagagagcaacaggagagttctggaaggtgttcagcacataaagtacattagctatgagacactcaagagggacatggttccatgtgatagagcaggagcttcttactacaattgtcatgcaagaccagcaaatccttataataggggctgtgaggtcattactggatgtgcaagaggtgttcaaggcatcaaaacttgatacagttatggtccattaaatggatgaaggaagctaggaaagtgtcccaagtggctgtatcatgtatgttattattcttaatttccttttccatctaatcttgtttgtttcatttatgagctttcctgtgtagttattatggtcattgtttttatacttttcaaatgctttttatttagttctttccttgtaacatatggtatgactagcttaattatgaaaatatctaacttttgttcttgagaacataccactgcaacttgacatactctttgcgattttgatgcctatctgttacaaaatctatttattgtagagtttagttatcaattgcaaggtgtgggacttcagtcccacattggaaagatggaatctagtgtggggtttataaagtcttgactctacccatagtggttagtttttatggtgtggttctcccaagcttcttttcaagttgcaaaatttaacaggaaattattcatacagagcaatcaacctgagcattcgtatcttatttaatatgtaatgggtctaaattttatttaaaatgaggctcctcacatcgagtccaatccccttctgcaccttcgtggctatatcgagatttcagggaaaagaagctgatttcttcacatttggtatggagaaaataggaaataagaagaagaaaaatacaaaatgcaaaccgagtttaaaacaaatctcatcttagtttttaaacacatagtttccatagaaaagagtgctagtaacacattctccaacgatcttattcttagattagttatgaaaagaggaacgtagtttccattttatgttagtaaaagtctgccagaaataatagtttctcgtgtcaaagttcaaaagtgggagccattttcagcaagttctaggaattattcactttttatgaactctctcttccttatgtttggttattctcttaataagtttatgggatctcgtcaaattccttaggatcggcttagtgtgggggatttggatagtttgcataagatctaagtcttttcttgtttttgtcgaaaacaaagtattctcgtagctgaaagctatggtaaaatactagtttaggagcaacttctctacttctattcacaaaaagattatgaaatcttcatggcatggaactaacgtatcgcatataatgtgttcttatcctccatagcaatcacaaagacagagttgtatttgcatgaagatatttcctgtgatactatggtattatagtaatgatgtgcgtgggaaggggggagttgtttaggaataatatcataatatgatagtgaaatgtgctgaacaaatgaacaatgaagcacttgggacaacaacccgggttggcatatgctaaaatgtttcattgtgtgctgcattgcactaatggaagataagcacaggaaaaataattgaattagcaacagatcagatataataattaacaagagattactagcactaattagaccacatggtttcagttatgtttctcttggcaaagccttcacattgcaaagttagtcaatagccactagccatgtgccaaatgccaatgtcaaactcaaaaaactgagctatgcttggctggagatttgtgaagcttgacaaaatggcctgtgatggcaatgttgatgttttattaacactagatatatccaagcatgctatgctatagcctataggtaatggtaggccactttcaacaacaacaacaactatccaagtgagcatttatgcattggtgcccctaggggatccacactccatactcgagcacttgtggccctcatcttttatagtgttagtttggaaagaggacccaatttacctacccaccccacctcattctttttcaacaaccaccaaaaagaagataaatcatagttgttaaaataaaatcgcctgcaaagaaacaatcaaataaagagaggggaaataaattattttcatctctttactcatttcttttttgtcatttttatttaattaaatgaagatttttattctatcatttatattggaaaatgtgatcacatctgcattaactaattcacttttcctatctgaatttacatttaatatatgtgtatatatatatatatatatatatatataaataagcactcttttctattataagagttacctttggtctattccctacaagaaacataaatttccctttctgtgacacagcattttaagtagttgaatgacagccaaataatctttttttgttcatgttatataaacccttaagtaaaatttgtgatatttcaaaacttatcttaattgatacaaatctattgctactatctataagccagtgctcctctgacaggtaatgaggtgataaactattttctacactggctactatctatcaaatgtttcactgcttcggcaggcaaggcaaagggctgtgaggcttttggaatgaaagcttttgggcctaagatgacagataaaacatgatggtatttaagtagggatggtaaaaaggcggtttaggaattagtttggagtcaggtttaaatgtttaatagaggaaagaataaaaaaaaaaattccaattccatctccgtcaagatcagaaaatcccagcacactattttcaaatttattttacttatacatatttttaaataaatactatattactatatattttaattcaaataatgcgtaaaattcaattgaaaaatcttaaaactaagactgaggaactaaattgtattttttagtataatatgtaattttaatgtttttagtgtgaactttaatgttattattaattatttttatagtttaattttgaaaatattatttttgctaaacaatagttactaacttactatgaaatttttaattttattctataagcaatatatgaatttataaaataatcaagtatttgtatttagttgaatatctcaattagtcatcattttgtatttacattacttttgtaaaactttgattctgaaaataatagtaagtctcctattattgagaagcccagtttgaaaacattcacctttatgggccggaaacctctaaaaagcctagagtctaaacctttgtgacttttcagcatctaacaattggtattttcgaattttctcttttctttacaatcaaagctaataaattccctagaagagggtactatatattcctctctaatgatgtaagtgatgatttagccttcagattccacggtgattataaaagtgtaacgtatttaaacttgtatttaaaggctaaataaatttataaaattatgaaacccaagcacacgaataaatatccataaatttatgtactggtaatctttcaagatcttctaacaatcttttccttatcacaaactagctcttttatatagttttaatgtagttacttggtgatgttttattacccgaataagttctactctttcttcctattgtagtaaaaagtagtaaaaaaaatgttattcaaaattgattcaggttaagaaaaaaaaaatcacttacacgataaatttctttaaactaacgtctctttcaagttgtaaaataattgatttacttatatagagttctaagtttgaatgttgtgaacgaaaaataataaacatgagaaaaaaattccacgtaaaatgtttcgtgcttgcgtaaagattaattgaatcttaaagtaatttttggttattgaatgttaaatccctaaaaaacttatgagtttaagatttagaagaaaaaaatataaaatgaatcaagtatttgaaattattataatccaaccaaacctaccacaagatgagatgagctagtatttgaaactcttgtccgtgaaatgatatttaagaaacttgcaaatttaatgcctaaactaaaatataaattttctattggttgcttacgctcccataggatatgatatgatacaaacaacttgcttagtgcttctccatagtgattgagtgtcatgcgttatatttccttaactaaaggcatcatgtgaatccaactgaatgatgattccatgaaaaacactatctcaaacaataattagagcgagccaaatgtcagatactccacatttcatgttttctgtcttgaactaaaataatgccataacaacatcactttcgcataaatttattatttattaatactacacaaagattatttatgtgaggccactccttcgacagaagggaactgagatcgtagttttaagatttgtcgaacacgcaacccaccaaataggggacttgtatagtaatgggattgataacctactatgttttgtcctttctgttattatttattgaggattgaggactaagcaagatacgacccttttttacttttctagatccacttctcattcctttgtgtgtgtctgtttttgtcttttcattgtatagcaaatcattattaatatccatgttcttcatgcttattttcacacctcacattagcttattcaagattcttaataaaagtattagtgaaaacagatttaaatatgtttttaatttttcaattttggatcatttcatttttagttctttaaatttaaagttttttttttgtttttgaaagtcgagtaatgctctttttaccagtgtgatccaatggagaataaggacaattttttacactcaaaaaataattttctattttatattttaaaatacaatttatgatagtttaaaactattaaaattaaatcaatgaaaaactttaaagcaaattttaaaataattaatgggtttttttatttttttttattgacttgatgatgataatttttaattgccaaaaaattatacatataaagtagaaaatcaattctaattgtaaaaaaatttcataaattatgaatatcttattttacgtttagttaatacagtaaagaatgatttaaaaaaatattatatgaattccagaaactaaagaaagtatcttcaaatttggaggattaaaaataagataatctaaaaacatatttaagttaaaaaaaaaaaacatagtgaaactttaaacaaatttagagtattgtgtattgacaaatgaaccgttaatttttttatttgtttatgacgtttttagcaatatctcaatagtcgcttgtgacttgttactctcaatcaacctttactaccactctcaatatacttggtttttttgttattcctgtcttcaaaccccccatactttgactcctgaactttgaggctgcgtataaaaatacaattggcgtatcggacatgcaaaattgcagattgtgtaattggcctctggtccttttccagaccaatattgagaagttcaggcccttatggcacagacaagggttgtattgaatctgactttgacaggtagttaaaatttactgtaattaatggcaatgcaagactagcatcgaagaggggtgacacagtaataatagttgacacaacgagagcgcctatgttctagcaaagaaatttttttttttaccactctttaccaacagcatccaagacgttacgttaggatattcaaattcaaattcttcaatgcgtcactgagaagctgttgtactcatttttttcacgtaaaaacagagaaccatctaacacggaatcttgcaaaaattgatgtgaaacaagaattctctgagcctaaattggattactgcctaaaatttagagtcattttgcagaataggtagggaatattttattccagaacaactttaatgtaaaatcttgattaaagattttaagttcaaaatcttatttttattaaatttttcaataaaagagataaagagatttccaacatgaaaaaatgagttcttatagaaaaacccttaagatatacatattattcaaaaaagaatatttttttttctttttctctttctctaagatttcaaaatgaaatctaccattaaagaacaaaatgggagaaatcttgaaagatcttcaatcctacgtgacactataaaatttaccgaaaaatgatctaagatcctaatttgagatctatcactaaagatactttgtcttttttctttctttttctaagcacccatgaaaacaaatcagattttttataatttgggcgaggtctaaatttgtttttatcattgtaacaaaaactaaagaaatcaaagcaaacgatatcataggttatttggacctttgttattatcctacgttattatcagtttgatagtaatataaaggaatctctcttgattttgagaatgaacaattgactagttaaagatattaatatttatcaatttttcccttgactagttttaaaatgtttgattttttaagccatttttgttattaaggtaaaactgtaggttttaaacgacagtgtaaacacccatcaaatcaaattaacaattgagaaaattgaattctaactcaccaatctgtgtaaattcaattaacaaagaacttgatttcccttaagcttgattctacttatgacttatgagagagctttaccccttaagttaattcaccatatagctaaaatcgaattaattggaacttataaggctctaaaaatatgcaaagaaaataggaactcgtaatataaacgatgcaaatccagtgctatcattattttttcaaataaaaaaagagaaaaactcgaatgaacttccataaaaaaaagagtttacataataaaattacttaattaccctgatagccttttttaaaaaaataatgcagaagcaccaaataatacacgatgtgtcaatgtgttatgaaactggatacatggtaggaatttttttctctcttgattaattttgatatattgaaatggtggacagaaacacattttagtatttaataaagcaaaatgcacacatcccccagacaaaacaatccttattcaatccaaattggtttcatatcacagaaaccaacagtatgtcttcctccttacccgtcccacccactcgaacacaaattctacggaaattaaaaaaagaaaaaagaagctaaaattcttctacctcaaatctgaaagtctaacaccaaaaattcaaaaaaaaggaaaattaagcaatcaatccgatttataaaaccgattttgtctttccctcactttccgttgatcatctcaatcacttagtacctgtagtgagcaggcttgtatggaccctcaacaggcacactgatgtaatcagcctgggcctggctaagcttggtaagcttagctccaagtttgccaaggtgaagtgcagccaccttctcatcaaggtgcttgggcaaaacgtaaaccttcttctcgtacttgccagtactcttctccttccacaactcaagctgggcaatgacctggttggtgaaggagcaggacatcacaaaactggggtgtcctgtggcgcatcccaagttcatcaaacgaccctcggccaagacaatgatgccggagttggtctcagggaagacccatctgtcggtttggggcttgatggtgatgcgcttcacaccggggtagttctccagccccagcatgtcgatctcattgtcaaagtgaccaatgttgcaaacaatggcattgttcttcattttcctcatgtggtcaaccatgatgatgtccttgttaccggtggtggtgacaaagatatcagcctcagaaacaacgtcctccaaggtcagaacctgaaggccttccatgagagcctgaagggcacaaatgggatcaatctcagtcacgatgacacgagcaccagcctgcttcaatgcagcagcacaacccttgccaacatcaccatatccagccacaacagccacctttccagcaatcatcacatcagtagccctcatcagaccatcagggagagagtgacggcacccgtacaagttgtcaaactgtcacaaccacagatcaaaaggttaataaaaaataacacgagcaataaagcaaaatcaattcataatccactagatccacaaaacccaatgacccacttattggtttcaagaccctaatccataaacaactcatcacgaaaaactcagtttggatccatgtttgcaaaattaattttgaaacgacatgctttatgtttgaatgtttttctaatcctaaatcaaaatcagtagtaaaattcaaaagttatctaatgtagcttcaaataaaaaatgtttactcggaataaatccttattttgcggaatcaaacatgtgatcattgtcctagagtctaattagtaagctacttactaacgttctgacgtttcaagtttcaacacactaaaataacacctaataccgatccagacttctcagacggcattagtcaaacagttaacagattcaaaacctcatatcaccaatgccacaaaacccatccaagaacaacagatctgaactcaaccctacatttaaacacataaaaagcaccagatctgggaaaagaagagacattaccttgctcttggtgacagagtcattgacattaatagcagggaagagaagagtcccattcgcctgcatctgatagagcctcttaacaccagtagtggtttcctcagaaaccccaacgagacgccccttcatcttgcggtacctggtgggatcggtcttcaacccatctctgatgatggtaagcacgatctggaactcagcgttgtcagtggagttagggtcggggagttccccggtcttctcatagagctcctcggccttgacgccctcgtggatgaggagggtggcgtcgccgccgtcgtcgacgatgaggtcggggcctccgccggggccccagtcgagggcgcgctcggtgcaccaccagtactcctggagggtctcacccttccaggcgaagacggcggcgctgtcgcgggcgatggcggcagcggcgtggtcctgggtggagaagatgttgcaggagcaccagcggacctcggcgccgagggcggtgagggtctcgatgaggacggcggtctggatggtcatgtggagggagcccgtgatgcgggcccccttgaagggctgagatgggccgaactcagtccggcaagccatgaggcccggcatctcgacctcggccagctcgatctcgaggcggccgaagtcggcctgggaaaggtccttgaccttgtattcgcgcccgctcgtggttttctccaccaacaaagccatggtttacgagccggggaagaagaaagaaagagtagagaaagagagtgaagaggtgaagaaagaatgtgagagtgtgtgtataaataagggtttgggagggggagggagagggagttggtgaggtggactagatctgtttttttttttgccctgtgccctgttatttgcatcatttagtaaataattaataagaaaatttattttttaatatagtttaacacgtttagtaaataagtaaatttttttaaatatgttggacaaatttttttagtttaaattattcatttagtcttttaaaactcatttgacattatttttgtcttgtatatatattttatatcaaccaagtttctctaaaattataaaacacaatatactatatttcaatcttcaatgtatttatttcacattataaatatttaaaggatatcatagcagcagcaataggtatcaaaatctatgttacaaaatgtttattagatagagataaattatttgttaaaaatttgattattatgctctgttcatatgttcaatgatgtgtaaaatataaaatgacacataagtaaaagaaaaattgagttaatttttatgcacaatcagtataaaaagttttacacatataaaaaagtgtaatnttgataattatgctatgttcatatgttcaatgatgtgtaaaatataaaatgacacgtaagtaaacgaataattgagttaatttttaatggacaatcagtataaaaagttctacacataaaaaaagtgtaattattttatactattaagtattaactaattaaaaatatgataggtatgacttttaacataattattgtcaaaattaataaatttattatatatagttgtttgtgacggaataataatataaaaactctacatttcaatagatagactattatcataaatttttaatttccttgttgaaatattttataatggaattaataaagtgtaaattttgttttattggttaggttaaaaacctttttttctcatttgatatcctttgtataataactaatatggtaaaaaatgacatttttattatttacaaacaccccgtgcaaaatataggtttaacaattagttaattattatataaataagttttataattgaatatgttagtaaaaagtaattataacgtacgttattccggtaaaattatcaattaatttttataataaaattatacaattttgcataaaactatttgctcactaagataaaagctgcttcgaaaaaaattaacatcaacatcacctttaatctaaattaattaggatcgataataaataaatccaataatagataaaaaaaagacaaaaaagagaaagagagatggaaagaaaaaggaaaaataagacaaaagaaacgaaaaataagctaaaataaaagaaaggtgaaaagaactaaaaaatgaagactagaacatgggaagactagaatataaacatactaatgggtttaatcctccaccaaatttataatttttctccactttgttctaagacacaccgttcgtcaatctatatcacactctattatatcttgtttaacaacctttccccaagtgagtttcaatccacctttatctttctttgtgtcgaacttttgttaacaaactcttgttctaacgagagcatatagtgatcgtctcacaacatgcccaaaccatctcaatctatactccctcataatcttttcatacatcaaactacttacctttcgtcgaatattttcatttcttatattattcatcttcgtataaccacacattcaccttaacatcctcatttctgctacccctattttgtgctcatgttacctatgtgctagtccaatggtggacccacacttgttttcctgtccgcatgtgcagacacaaatattttgtatttttttttataatattttctactgagcagacatttgacgcatatgtggttggaaaagaggatgctcgtggaattgttgtgattcaggagtggtggggtgtggattacgaaattaagaatcatgttgtgtagatttgtgagcttgggtagtgggtttaaagctcttatctcagagtaagataagataatggcactttaggggtagggtggtttgagaaaacatttcatgtttttatttttaattacaaaaaatattactagcaaaggatggacacttctattagcaagaagcgggaatgaatttatataaaagctgtgatatatgtgtttaacttaggtattactagcaagtaccaattattctcattgcagtagaagcttatataaagggattaggatctcttctgattcattctcttgaagtaaagttcaatatacaaaagttgattatttatgctctgtttatcttcatgatatataaatcttgggtatagcctaaattactttgttaatagtttgtcgcaatattttttactcttcacatgattaaactatcaatattgttggtaattatatttgactttcatctttggctcattttattacttaggggttgttactttcaaatattttgatcttacacatactatattttgagcgggtttataatcttgtacataaaatgttgatttaaattttttttacaatttttttttcgggaacgctgcccccgaaccccaccaataattgtgcgaacataaattaaaaatcatgggtccgccactgtgctagtcaacacttcgctccatataacattgtcggtcttacagttgttctctagaattttccttttaacttaaggaaaattttgcggtcacacaaaaattcatatgtgttccatcattttattcaccctaccctgattctatgatttacatctttatcaatttcaccatctttttctccgaaaaaaagtatgctgcaaaaatttatgaaggtgatgaaaactatttttatggcaattttttattatataaataaaattttgaatcttataattaaaaatgatcgaatttattatatattagttaactttattttcttactttatccataataatgaattattttaaatacaaatcaattattataaataacttcatatatctcttttattacgatttaaaagacatgttcaaacaattcaaataattatattaaaatcactaatcacttaaaatacgaaaaaaaaaatatatgtgatgcatgaaagatgattgcaagagtcaactcctaaaatcttggtattaataatgtactagtataagggagatggggtcaccatagttgtatctgaattgctatttttcattggtgtatgacctattaactacgttgtggattgccaaatcataatatcagtgaagctgaagcaacaccctccgccagcgccctgaatatatatacgtgtgtcggtgtctgtcgtcggtgatttgcttgtaaattatttgaaaatgaaagaaaactaggaatcgtaaatggaagacacaaggaaagtgaatgtgcatgtctgaaaacattctgataaaataaaagaaaaaaaccagcatacataaataatcaagctgtggtccccggttatggagattaattagatgtggccttggaaccaaccattaaccaaaaatattggcaccgcacaatcacaattattgagaagatatttttaccgaatcttggcacgactcggcgtgttgcaatcgcaccaaaatgcaactgttggtctcgccctgtactcaccctagcttttataaaactcaactgcacattgatcttctatagtattctttttcacctactaaggaaattattagttttccattaaaatattcatggaaaatatgtttttagagtaaaatttggttaaaaactgttttaaagaaataaaacttatgatattttttcaaacacactttacaaatttaagtttaatttaaacttaagtttacaaattttaattaaaatatacattgatacgaggtactcttagactaatttattttgtttataaaaaaattgttaaaattttacatactttaaatttgtcattggtacatccaaccaactatgtacatcaaacttgagtgatatttgtgttgaaaggaggatgggagaggcatgacagagggggctggcttctagtttacccgagtgagaaggttttcatgatataaatatctcttatgattatgtttatactaacatgatactatcaattaatatggtccctaaatcattaggatctggtctcatgtcaggaacttacgtttcgtgacatatcaaaaagttgtaaattaggagtagaaatagactagaaagtctttcagggatctacaatctagtttagttaaggttttgtttggcttaacttatttattaaaacgtttaaatttgagctttttaaaaacctttttaattaaaaaggttaggttataggctttcaaaaaaatcaattaaatctgaacattgtgtctatataaattataatttataagattatatttgataatttataacttataagagaaacatatctattatgttattttttacttttaattatttgtttttatttaatcagactttgtatataggtttttaggctaggacagacctttatgcaggttacacttaggtcttaataacttatatttaacatgtaataaatcaagcttaagcttaatgataatgatacagactaggttcaaacctgtcaaagtctagtttgacttaacctatttttattcctagttgcaatgatacatttatacaccttcatacttggtataaaaccgacaatatcacatacgcatgtgcatgtcccccctaaaaccaataatgaggggacacatggcaagactagtttgaggacattttatattaatagatatcagctgcatggctcaagaaacgttaatggttgggttgagctaaggagggtgcttgtgaagcttatgagccttagggtgcttgtctctccctttctctcttcgacgtcctcttacgcgtactataatatctttgattttcaatttcttggcggctctcacactacgacacttcattcaatatctttgttggtcaaaatcttccactaatcagaactctctgtaggtagccattttcgagactttgactatcattctgcctgttttcaggatcaatgactgatcccacaaatcaacacaagatttttcagcatgttttgtcctcactcatatgctttcagggaagcttccaaaatattactcatcttataactactctaagccaaacacttaactatgaagttcttaagtaatgaactattgaaaagtatatgtatcttgttgatagaggtagtatcaattaattcatttaagttattatcagtcatacattctcatacatgcacaatttttgcatccctctcattctggtgtaattcgatttgaatgttacacttactatctccttgtacctttgaccgtatagataaactgatgtagagttattttaaattaaccaataatcttgaattcaagtaataacaatgcgattgttttgatacttatgaagagttttttcgcccataaaaatcatgttcgtctcaaatagaattgattccaataaaaaattaatgtgtttaatcttcacttttgtatctttatttctaaatgggatttcaattttttttaatgacgaaattatcataattagttaaaaaatatctttgttaattaattttcaactatcttaaaagccattttatattactttttttaaggacatttttatattagctttgcgttaccagcttgccacacaagtacaggtcaagacctggaaaaaactgtgtcggttggttcctgtttaaagaaaagagaataaaaaataacaaaaagaaaaaaagtgcccttccattacattcgcattcttaggaaaagagtgagcgatcccgggaaattaattaatatacgactaaaagatttgcgaattataataattaataattctttttaaaaagtaaagtacagtactgctggaaacatgaacatgttcatatattaaaatttaaaagaatatgaccagtaacaaaaaaaaaacccatgcatccaagaaagaaatatcatgtgcttctgtgtcctctatctgagatgtgatgacctttttcaaatgatcataatagttacttcataatgacgacatgcatcaaactattttttcttcaaaaaatatattggcaactttttactatgataattgtataaattattgttagaaatttatttaatttttatttggcttctctatttataaaaagggacattttttaagagaaaaaagaaatcaaatcatagaactcagatagctcgcccttctctctctcttttttacatgcaaatggccgttccaactattattactaatttgtaattattgaagtaaaacaattcaatgaccaaattaatgttaaaagttaaaacaaatacagtatatcaacaaccttttggcatagcttgagtagatcgtaaaattaggtatttcctcaattaatacgcttatattaatatagcctagatgtagatgcagtttgtcctgcgttgtaattaaataaaaatatcacggaattattatgagagcattattgaatataataaagtaagtcataaattaaaaactgcaggtgggtaattgaggacttagaagttgggacgtgccaaccgcaaataacatacgtgatttaaagactctttacaaatggctttgacaatggccaatgggcgatttaagtcaaccaccacatcaacctctggaattatgaagtaagaaactaaaatgcttcctagtcagtgaactagttgcatctcatttatatgagaaattttgaattacgactttcttggccatgttggtagagtttgggggaattcaaacttggtggagtggttcagcttaatctacaaatgtacatttgttcaagtggtttggtaggcagattttttcctcatcctggaatttatttttttattgataacatatcaatatctcttgacgatgctacgagatttctcatgattatagaactgagtagggtggcttaaaaggcttcattttaaaaataatttcaccacattgaattgaatattagtaaactggtatgcctgtaaagtgtacaataataaatgttttgatagaagctggtaggattttaaaatagctcatgtataaaatgtgaaaatggaaacgtgaactaaaatgctaataataaagatatatatatataataaaagataaaaactaaattaattaaagttaaaggataaaaagcttgttacatcaagtcatgttaaaggtgcattagagggtgcagagtaaaagttaccactggtttatctctaatgatgttcttaattaaatatcttttgacttatggggggtgaagacacaagaggttgttgttgtgatgtgattttggctgaatatgttgtattatgataggtaatacaaaagacaaaattttacattaattagtatacttttgactcattggtttatatattattttgtgatataaactattaaaatatttaaaaagagatgaaagacttatgtccatgaacttaaactaagcaggctttcctgaatgcaaatccgtcaatttaccccctgcgcgtgcgataatcagccaccatgcacaacataatatgcatgcctgctgaacattgacttcattgttaaatcaaaattaatcccatagacctattgtagtactcaatttcatcaatcaaaatttattggatgggggaaaaatacaatatttcgtagttcctagtcatattcagaaacctaaaaattaacaatccccatgttagtgaagcaaggtgtcggggaaggaaagcgtctgcatcagtgcagtagagagggttggtgattttggtgggaataaattggctatattgcccccacctaccacggtgctaccaacgttacacagaattgagaatgaaacctaaaaccaaatcttgcagtgacgtacaatgtacatatgctacgagggcatcaccttcaggtttccagtcaaatgttgaacaattggatttcttagcttgctttaacttaagttgaagtttaagaagtgaagctgatgcttgtttttgaatgaaaagcctttgatatatattttaatgtaagcattttccaaatttaactcgtcccatgcttgattgatcagctaatcaagctaactggtttgataacagatagacttctaaatctacgagtgtgagtgcaagcagcacaccttttaaatactagccactgtttgtctttttaatcaacagaaagagaatcccactaataacactattcgagatcggtgttcttttctgtttttttccttataaataaattaataagttttgttcttgtcctgttaaaaactgctctgttgtttcatgtgttgttattaaattaaaaaccagaacattacgaataatgacatgattttattcacatctacaagcaaatttacctaaaaaatgtgaatgacgtggaagcaagtacttcatgctttgaaattgacacacgttggagtctctaatgtccaaccgacactctaatatcctgtttggaacaagctaggacataaatatttacaccaaattaaatattcgtaatttttgcttttacgttttccacattaaagacgtgatttattggttgtgaagcatgttttcaaacatactataaatgaatataaatattataaggcaattaagtaataagtgggaaaaaagttactaaaaaaaggcacggcaaaagtttaggaagaggaagaagctactctgtctgtaacgagcagcaggcgaacaagtggagacaatttaaccaaccggaagcacagggtacaacggtcaattcacaggcggtcgcaaagcttttaaaaacgcacacataggcactgggcactcacattcgccttccagctcaaaggcttagaccaacacaacaacactctcttcactcatttcatcttcaacattcatggatccagtgagcgtgtggggtaacacgcccttggcgacggtggatcccgagatccacgacctcatcgagaaggagaagcaccgccaatgccgcggcattgagctcatcgcctccgagaacttcacctccttcgcagtcatcgaggccctcggcagcgccctcaccaacaaatactccgagggcatgcccggcaaccgctactacggcggcaacgaattcatcgaccagatcgaaaacctctgccgctcacgcgccctccaggccttccacctcgacgcccaatcctggggcgtcaatgtgcagccctactccggctccccggccaacttcgccgcctacaccgccgtcctcaacccccacgaccgcatcatggggctggatctcccctccggcggccacctcacccacggctactacacctccggcggcaagaagatctccgccacctccatttacttcgagagcctcccttacaaagtaaactccaccaccggctacatcgactacgaccgcttggaggaaaaagccctagacttcaggccaaaattgataatctgcggtggcagcgcttaccctcgcgattgggactacaaacgcttcagggaaattgcggataagtgcggggcattgcttctctgcgacatggcgcacactagcggccttgtggccgcgcaggaagtgaacagccccttcgagtattgcgacattgtgaccaccaccacgcataagagcttgcggggtccacgggcggggatgatcttttaccggaagggcccgaagccgccgaagaaagggcagccggagaacgcggtttatgatttcgaggacaagattaactttgcggtgttcccttctctgcagggtgggccccacaaccaccagatcggggctcttgccgtggcgctaaaacaggcctcgtcgcccgggtttaaggcctacgccaagcaggttaaggccaacgccgttgcgcttgggaattacttgatggggaaagggtacagtcttgtcactggaggcacggagaaccatcttgtcttgtgggatctcagacctcttggattgactggtaatatatataggattggaccgctgcattttgatttcgatttgttgccaatgtatctgaatctgaatctgactcgtttcttgtgtttattgctttgcagggaataaggtggagaaactctgtgatctctgcaacattactgttaataagaacgcagtttttggtgatagcagtgccttggcccccggtggagtgcgaattggtaaccaacttatttctcttttatgtgctagaatacagatcttgctttactaactcaattcaaaacaagatctcattcttaagatcaaataatgatttcctaaggctaggactatatcctcaatttttttttttttatcacagaacttaatgaagtttcttacgaaattttgtactgttttcttatcagaattggaatgtaagtaataatgtttctattaaaggctagcatattccaccacctgtccagggttgagccctgggatatatcgaagtgaaattttaattttgattggagaacaatgcttaaaacacaaagtgattgtatctaagttttgtgcatattttaatgcatttgtacaaggtatcttggtaagttgtagattagtattggaagaaatttcattgaggatgtgtttttaatttctagtgctttaacaatggtgtattagatcgggctaagcttgcagactgccattattaatgagtttctagttgtttgattgtgcaatatgattgccaaatcaattactataaactaatatgtttttttgttatttgtttttaatatttatccctaaaaatgaattatcttgatgtattaattacaaaaatgctttttttttattgcccctgtttctgtatttttctctgatgttagtgaaatgtgtgactgtgctttgtttatcatgggtgagtgcctgactggagtttgtgtgaacaggtgcccctgccatgacttctaggggtttggttgaaaaggactttgagcagattggtgagttccttcaccgtgctgtgactctcacactggagatccagaaggagcatggcaaacttctcaaggatttcaacaagggcctcgtcaacaacaaggccattgaagatctcaaagctgatgttgagaagttctctgccacatttgacatgcctggcttcctggtatctgaaatgaagtacaaggattaggttcaatcataccgctctctactgaattatgttactcaaagttcggcgcaaagggcagaaatggagaaaaaggaaataagtgtcttcctttctgggagtattagggtttatcgtgatggtgtttcaattcaatagtttgaagtttctttgtctttgatttcatgtttaatttgttagcctgattgatatcatatttttttcatatcaaaattgaaataatacacctgctttctttattttcctcgcaagctagtagtagtatgtttcatgatttcatcttcaaaatattgctcaacagaacatcttaattcttaacaaccatgagttttagttgagttaagcaaaaaaaataaaaattatccaaataaatctatcgtctttcttatgcctcaatgttcaatgcctcccccccctcccttgaaaaccaaaatgctccgtgtctaattgtgataaaccgataatacccctctggcagattatgaagttaacgtaatcctgtaacctattgtagatagacttttgtaacttaaactcaaattcttattgtggtgttttcattgtctaattactgaatcaattcttgatgcatcacttcaacgtcttcttgctgtagtaagttccacacgctcctattggaaagagattatgcatcaagagttaatcggtagaagcaaaaaattaataagacattcattaataattatacagcgtgacttttcaacatacttccaacatcgttgtgtaaattttcccaatcccatatctgctgcttctagtttcttatttttgctcatgtactcattgccaatggatccaatgcaagaaagcctgctaaaagccattaaaatgtacataggaatgaagtgagcagctattgcattgtggttgttgaactaatttacttgatgcaatctgaatcagccactaaagggctcgtttctcctctcattagaggcgtaggatttgtttgctcaatcagcgtcctaaaacacacatcttatctctaatgatttctatcattgccagaattacaattaaaaactaaaatatcatttaaggaaccaaaaagttctgggaagaaaaaaaggaggatcagtccagtaaatgtaatcaattagattgaattgaacttctacagacccagaaggccctcgatgcattttcaccgtaggtggtttgtctttctgtactatactgctcgcttagcaaaataatcaggttaagaaagtttgcaatttttttatcttgttgaggggtttgttgtcattgaaaacaaattgtactcaggaatttgactcaacatgttcaacccacacattatcacatttaaacaaatctaaatcaatcgcaaatcatatattcaacgttttacatactaaatatttcatatcatagttcctcacttcgttactacaaagtcaaaactttatgtgtacaatattctcaatacaaattgaaataagaatcaatattcttacatcatagactacaacatgaggttttaacatgtcatgtaagaaacttaatgccaacgagtaaggcttgaaatatgattagagtaagaaacttcccagattttataactagaaggagaatgcacgtgttaggttttatttctccttggaatcatagtaaaagtacacccaaagaaagccacttgctggtttctttgttatcaatcaatgtcagagataactctcaaagaagccctagtttggaagatatatcatacaatttagaataggctaccaatcaattagaaatgcaaatgagctaaattgcatcaattacttcaatttctagttaagaaggccttcacaactattggactcttgacgtaatgcttgccatctgaccatatcagttttccaaacacgtagttatttgtggcctttccttgcatggccttgaaggttactttaaagctcttctcttcaccaacatttttgaacttcaagatgcttggcttcacagaaatggtgattccatgcgggttttgaacatgagcaatgtacgtccctggagaaccaacatttttcaatctccttgtaactgtcactgacccagagagtttggggactgtgattgagggatagttcaggttgaggagactaaatttcttgcggcattgatatggaccttctgtgaacactgagatctgtgtcgcattgtaacctaaagcacataagaagttgaggtaatcatcaattgttgtgtcataaactagcccgggatccattgctctgtttggttgaacatgtcctgccccgtaactgaatggtgttgccttgccattagtagcattcagtagtggttccacctcattgtctagtgttgtagctgaaagttgcagaggacaaatcatcaacttttgatagccactttaacctcaccaatcaaagttgctttctatatatgtatggacaaaaacttagatacagttccttagatactattggtgttgttctccaattagaattggagtttcacctcccctcataatcttacatatagtttcttaggtactgtaatcgctgttttctaattcgaattagagtttcaccttgcacaatcttttaatgaaaacctttattaacactagaagaattaaaaaaactatatctaagttactttctatatgtatatatctaagctttatatttctgggacattttgttgtagattggcttaagaaaaaggatttgaagcgtgagaaacttgaagaacatctcactcacccgtggtcatgattgctgatttaatagcagcaggactccacgtaggatataaggctctcaatagtcccacaatgccagaaacgtgagggcatgacattgatgtgcctgaaactgagttaaatggaatcctgcgcttgtcgaacacttgattggttggtccttgggcttcagtataggccgctataactgacacccctggtgcagtgatatcaggctgaatatatgggacaaattaagagttgttagatatctaacacattacaaaaaattacaagccaaattacactagtgagtaatgtcacctttaggatctctggcacgatagtatttggtccttttgatgaaaaggctgccataaacggggctggcttagtatccaactgagtctttggatgtgtaatatatgccactgggaacctagcaatatataaatttcaagtagtcaagttgaaaaactgaaattcatgattatcctttcgggatctttatatagctcaaacaataacaatcacaaaaaaactagaattgcttcctttacttatttgaccataaactgtaagtataatagcaatccatttgaccataaactgtaagcataataacaatagtatagtgcaaactccaaagtaggcataactttaaggcatagcatgaattagtattaataagtggtcgactagactggtaagtatcttacttggttgagttgatgtaattaaagacatcactgccatcagtaaaattgatatgagaagcaggaaggacatgaggatcagctataatttcattcccagtagtcttgtcattagcaaggaccattcccacagcaccagcaagaaaagcttgctctcccttgtccactcttgcatttattcctcggagacataccacgatctttcccttcaccttgttgggatccagggtcccattctggcacagcaccctgcatgcacataaattttatttaccatatctagtactatgttaattatgccaaatgatcactcaacaactgacgactataacgaatttcaattttttttttatacttacgcatctccagctcttgcactcgccaatttagcatctgtagctttaataattgggtagaacttgcgtgccaatattgtagctgataggctttcgcccttcaaatcaagcaatgtacaagaatattgagtcaggtgataatgttttatatattaagagtgtctcctagatcatattagttttttccatcattttttgcaataataatattaattttgactgacatgacaagtgcccattttattttacatgaaatctcttacaatgccacatatcatcaaattatcttgatatgataaagtgaaataaggactaacttagtgtattataaacatttaagggactatagaactacattgtaaaaaataaaaattacactcacggtggataaagttaaactctttcaaaatttccataaaagaaaatgtgtgtgggaaagagacaaaccttgaaggtgatattgttaccgaggacaacgtaagtggggaactgtcgatccatggtgctggcagctaccgtaacatgccagggtgcaagattttccgcagtggcatccgcaggcccagtgttgccagcggagcaaaccaccacaatgccatgtttggcggcatggaaggaaccaatggcaacactatccttgaaaagcgtggaggtagagccaccgagcgagacggagaggacatcgacgccgtcgtggatggcgaagtcgaaggctgccaagatatcggcgtcgaagcactcgtcgccggcgacggggggccagcagaccttgtaggctgccacacgtgccattggtgagccacccttggctgttccgtggccctggccgaagacgctgacacgtgcgaccatgttcccggcagctgtggatagggtgtgggtcccgtggccctcgttgtcacgtggcgagtcaaaggaggagttcaggggacccgccactgaggcgtaccccttgttgaagtaccttgcccctattagtttcctgcattgtttagtgtgttcaaattggtgttaatggcgtttgtcttgagtgaggaatgagtggcccctcatgttatatgggaaatgctgaccttcagagtgtgtatgaatggaaggaacatagataaggagaaaaaaacaagaatagtgtgtacacatttgaagttaatgtcataatcctttcatgaagagtggccctcaataagtggttgactaaataagataaatcctaaattcaaccaaagattgttgtacttcatggttagaaaagggttaataacatattttctaatataactttttcttataacaccttcttttactttctttaatctaatcttaaatataaggaggaaaaattattctaataaaaaaattaatcgacatcatttaattatataaattttatttaaaatatttgtttctaaatcattcttaatattcttattaaataaaataactgagatttatttatatttgatattgacacataaggaatttttttcttcttatattcaatatgatattaattaaaatttattaaattaggaaagagaatactgaatgagaggtgagattcagaaaaattgatgatttttaataaataataaataatgtgttgaaaataatttattattaatatttttcaaaatattcttcttttctaacaaggccatatcgttctagacacggagagaggaattcagattaagagtttttttaaagaaaaccttggatataaaatgacaggaatataatgaccaggtttacattcaatttatccatctccataaattttcaatgttggttcgtttgattttttaaaaagtctttataattacaaaatatatttagcattgaataaatattttaaaataaaaataatagtttgatgaattaaaactatattttctttaaaaaatatattctgaggagacttgttaacgagatccaatattaaatactttaattcgaattttctttttataaatatcccaacaaactcaaaggaagatggtacctgttgcagtgaaaagtatgatcaattccgttatcacagattcctctccactttgaaggaattggtcccaatccttcctcactaaagctctttgattcaggccaaacacctagcggtaatgcggtgggagcaaaagagagaagagtgtggtcaaaataagataagcatattgtaaaacggagattctacttccttctaccccttctccctcaatctcatccaaattggctaaaagctagcatcatgatggtcctgtttttagttttcattgcccccacccacttttcatgcttacagtttgggagcattttcaaaatgaagctcatgtaatgcacttatcgattttcttattggtgagcttattatgacttccttggactatccccaccttggcaccattcttagccccacctcacattataagcccaccctttttatttatttatttattttagtcctatcgtaatgaacagaagtcacaacttatagttttgtctcaatctaagtatgatttatgaccaaccttctgcatcacaacatatgcatagactgaaaacatatatttataacttttaaattatttaaaataatgaacatctaatggtgtagtataaaccaataattgtaacaaaattctaatcctaatatatataacagacaaatgacaagatgcctaattgcccatgtcgcctttctaaaggtggtccattctgaaagtcgactactccattatcaccaaacattttctatacatactaattttaccataagaagtttttcaatttctttataaataattactttcatcttattttattttgatgataatatttttttggatgatctaagatatcactcaatcgaaaattaatcttttaaaatattaaaattcatttaagaagttgacttcttctcatatatgattttgatcatatttttaagggataaaattattttacttaatcatgtcatgtttgtccatttcattttagtgttaattatgctttgagtataattactatataaaaatgatgtaagtgtagttatagctaatcacaagagaataatgcaattagtctatttctttaagatggttcgtgaacattcatactttgggtgtggaaaaaaactagtctaacaacccattgacggcaagattcaaattaataataaactaatgttatgaaatcaacttttttgaaacgatcaaactctggaaacagattggtggtgggggatagagatacgatgagataactttgagtatgttccacatgtgtgtataagtcaacgatctagattaaaccataataataataataatcataataataataataataataataataataatcaaaccccgttaattccaagatgttgctgaccactttgaaaagaatagcaagagtttttaaacacataaatcaggaaaacttaccggtatccaggtttccaatgatgactccctcgccaaatctggctttattccagattgagttggattggatcaccccattatgctctagccccatgaaatcccatgatcgagtggtgtgtagctttctcccacggttctcgaacactgacaacactttggggtgctctagaagcagtatggacaaaagggtataagtacacaatgagatgaaggaagcacagagaagagaaaacagaggaactaagcagaggataaggttcttggttcttacttgatatctcagcagctacttcttcttccaaagttgcagcaaaaccattgatgtgccttgtgtatgagtaaaagatggagtccttggttgtattagaactacaaaaaataagcaaactcaaacaatttcaataggtaataaattgtaccatatgtgagttaagatgttataattgcatttttttttaataccttcctaagaaagatcccagaaactcatggtgggactgtgtcacttgattgaagtcaactgaggataattctggcttgtgtgagtgggctcccaagtacaccacatatgactacaatttaaatggttcagtgcaagcattagatctttttccacagttttatttatctttttcaagattgcaaattgcaatagctcacctttttcactgcaaagctgggtctgtgcagtagaaagacaagaagaatttggaggagaaagtggatggaagaacttggtggcctcattgcttttcctctctttgaagtcctcctttgcttttgccttgttttgaatgtaacagaaacacaacctttggttttataggtaataacagccttgtaaaatatagtcattgcacctttgctccttaggttgaaattatatttaatgtactatgtttgccatatcagattcagttcactaagtggttttaatactttttttaaaaaatttgtactgtacttcagagctaagtttttatttatttataaattttacatggtattaatctgtttttgtatctgactaataatagagtttataatgttatattcttagccttaaaaatattatacacaagcacactctcattaaagtgtttaaaatagagatattgcattaccattatatttaaataataaaaatatacattagttataatttcatttgattaaataaagagagccatcaaaactctctcaaactaagcacatccgagaaatcaccaacgtgacagctaataattaccaaatataatattaacaaggtggctttatataaattggaccccatacagaaataacacttttggactattgcgggtttgtgaaaaataacaaatgcactgtttatttattccgagtgagtgtgtagcaagttaattaattaaggcgaggattgaggaaataggtaattggcaaaaaattgacaagttagctttaagtacaaaaaaatgtaatttctatccaaaaaaaaaaattgtaactgaaagttactaacagaaaggtatttagttaattgaagtagaaatattaataaaattagttataaaaattatgactactatgaatttatcgttaaatttaaaaataggttcgactggaatttaatatttttaaaattttaattataaaagaagtgaaaatagaaatagaattttaaaaattggattgatataatttgtattttttatataaaattcatatatttgtcctttcctgcgagctaaatataaaaacgtatttcactgtaattcatcaatgcttagaaataagtttttcaaacttatgccaaagataaagatagcatattgatgaataattatacaaattttacaacaaataaactataaaaaaggtaaatcattcgtgtcccttagtatatgtatttcttttaagaaataatacatcataaaaaaagttactaaacaggtaagttcaaggcgtatgttacccttaataatcacattgggttgggacgtcaaggttaacatcaattactcttcagaaatggcctcgtgtaattatttttaagtgtgattatcaatttaaccaagaaccaattaagaaaaatgaaagcattattgaaagaagacgataagtatataatgctgtgatgagattccatcgcaatcaaaatagcatatggtatactgttgccagccataaccatatttatgcttcgaaaaggatggcaaaaggccactgctgcctgcgaaaacctccggcggacagatataatctatttgtaaattgtaattatttataatttatttatctcttataacttttcagatatttttatatctgttctgtatagtttctagaacacaaatgtacagcacgaaagcgctgtatgattactgtttgatcactctaactccgcaactatgaagatatcgatggtgaacgatatcccacagtagatgatcactgagatacacgaaattggggtggggtgtgtgctcagtgtaattgaaagagagagagagctagagtgtgtgtgtacctttcaccaacgagcaagtcatatttatagatagaatacctgaccgttggccaactgcatcgtgcacgagtggttcctatattcccggcttttacctgcacgttagtaactacctgagtggactaagtctttagtccatgttcattgaatcccaatatcaggccacgatcagtttacatgtcgcccactaattgggccttaacctaagcccaattgtggcccccagaacagttgccccccagcccggttgccgagtacactcgggagccggggtgcttcctccgacaccgcaattgtcaagtagacgactacaattattcatcctcgtttgtccggacacaattcatccgggtactgggagcggccccgacccgggtacatctcatccggacacgttgtggacgaccccaataattaccttctgatcgacattaggagttgaagtcgaacatttgttcaaggaagaaacattgtcgaccatctatctagagaatcgtgcccgggttggtggtacgaagtcgactcggtttaaattacgtccgggttgccgtcctcaggaagactcgcgaagctcctaggcttccacccctgcgtcggttattattctttgcccttaaaggcagttaacgcatttaatgcgtccgtctcttcactgacttggtgatgattgcccattatgcacttttaccataatgcccttgcgacgtttcaattttgacaactgaaccggttcttttccttctggcggttactgaaactgtcattactttttgaatttgattttcgaaaattgccttttcgtgcctactactcccttacttgtcatttctggttatactctttctgtcacttcctccttttctctcaannnnnnnnnnnnnnnnnnnnnnnnnnnnnnnnnnnnnnnnnnnnnnnnnnnnnnnnnnnnnnnnnnnnnnnnnnnnnnnnnnnnnnnnnnnnnnnnnnnnnnnnnnnnnnnnnnnnnnnnnnnnnnnnnnnnnnnnnnnnnnnnnnnnnnnnnnnnnnnnnnnnnnnnnnnnnnnnnnnnnnnnnnnnnnnnnnnnnnnnnnnnnnnnnnnnnnnnnnnnnnnnnnnnnnnnnnnnnnnnnnnnnnnnnnnnnnnnnnnnnnnnnnnnnnnnnnnnnnnnnnnnnnnnnnnnnnnnnnnnnnnnnnnnnnnnnnnnnnnnnnnnnnnnnnnnnnnnnnnnnnnnnnnnnnnnnnnnnnnnnnnnnnnnnnnnnnnnnnnnnnnnnnnnnnnnnnnnnnnnnnnnnnnnnnnnnnnnnnnnnnnnnnnnnnnnnnnnnnnnnnnnnnnnnnnnnnnnnnnnnnnnnnnnnnnnnnnnnnnnnnnnnnnnnnnnnnnnnnnnnnnnnnnnnnnnnnnnnnnnnnnnnnnnnnnnnnnnnnnnnnnnnnnnnnnnnnnnnnnnnnnnnnnnnnnnnnnnnnnnnnnnnnnnnnnnnnnnnnnnnnnnnnnnnnnnnnnnnnnnnnnnnnnnnnnnnnnnnnnnnnnnnnnnnnnnnnnnnnnnnnnnnnnnnnnnnnnnnnnnnnnnnnnnnnnnnnnnnnnnnnnnnnnnnnnnnnnnnnnnnnnnnnnnnnnnnnnnnnnnnnnnnnnnnnnnnnnnnnnnnnnnnnnnnnnnnnnnnnnnnnnnnnnnnnnnnnnnnnnnnnnnnnnnnnnnnnnnnnnnnnnnnnnnnnnnnnnnnnnnnnnnnnnnnnnnnnnnnnnnnnnnnnnnnnnnnnnnnnnnnnnnnnnnnnnnnnnnnnnnnnnnnnnnnnnnnnnnnnnnnnnnnnnnnnnnnnnnnnnnnnnnnnnnnnnnnnnnnnnnnnnnnnnnnnnnnnnnnnnnnnnnnnnnnnnnnnnnnnnnnnnnnnnnnnnnnnnnnnnnnnnnnnnnnnnnnnnnnnnnnnnnnnnnnnnnnnnnnnnnnnnnnnnnnnnnnnnnnnnnnnnnnnnnnnnnnnnnnnnnnnnnnnnnnnnnnnnnnnnnnnnnnnnnnnnnnnnnnnnnnnnnnnnnnnnnnnnnnnnnnnnnnnnnnnnnnnnnnnnnnnnnnnnnnnnnnnnnnnnnnnnnnnnnnnnnnnnnnnnnnnnnnnnnnnnnnnnnnnnnnnnnnnnnnnnnnnnnnnnnnnnnnnnnnnnnnnnnnnnnnnnnnnnnnnnnnnnnnnnnnnnnnnnnnnnnnnnnnnnnnnnnnnnnnnnnnnnnnnnnnnnnnnnnnnnnnnnnnnnnnnnnnnnnnnnnnnnnnnnnnnnnnnnnnnnnnnnnnnnnnnnnnnnnnnnnnnnnnnnnnnnnnnnnnnnnnnnnnnnnnnnnnnnnnnnnnnnnnnnnnnnnnnnnnnnnnnnnnnnnnnnnnnnnnnnnnnnnnnnnnnnnnnnnnnnnnnnnnnnnnnnnnnnnnnnnnnnnnnnnnnnnnnnnnnnnnnnnnnnnnnnnnnnnnnnnnnnnnnnnnnnnnnnnnnnnnnnnnnnnnnnnnnnnnnnnnnnnnnnnnnnnnnnnnnnnnnnnnnnnnnnnnnnnnnnnnnnnnnnnnnnnnnnnnnnnnnnnnnnnnnnnnnnnnnnnnnnnnnnnnnnnnnnnnnnnnnnnnnnnnnnnnnnnnnnnnnnnnnnnnnnnnnnnnnnnnnnnnnnnnnnnnnnnnnnnnnnnnnnnnnnnnnnnnnnnnnnnnnnnnnnnnnnnnnnnnnnnnnnnnnnnnnnnnnnnnnnnnnnnnnnnnnnnnnnnnnnnnnnnnnnnnnnnnnnnnnnnnnnnnnnnnnnnnnnnnnnnnnnnnnnnnnnnnnnnnnnnnnnnnnnnnnnnnnnnnnnnnnnnnnnnnnnnnnnnnnnnnnnnnnnnnnnnnnnnnnnnnnnnnnnnnnnnnnnnnnnnnnnnnnnnnnnnnnnnnnnnnnnnnnnnnnnnnnnnnnnnnnnnnnnnnnnnnnnnnnnnnnnnnnnnnnnnnnnnnnnnnnnnnnnnnnnnnnnnnnnnnnnnnnnnnnnnnnnnnnnnnnnnnnnnnnnnnnnnnnnnnnnnnnnnnnnnnnnnnnnnnnnnnnnnnnnnnnnnnnnnnnnnnnnnnnnnnnnnnnnnnnnnnnnnnnnnnnnnnnnnnnnnnnnnnnnnnnnnnnnnnnnnnnnnnnnnnnnnnnnnnnnnnnnnnnnnnnnnnnnnnnnnnnnnnnnnnnnnnnnnnnnnnnnnnnnnnnnnnnnnnnnnnnnnnnnnnnnnnnnnnnnnnnnnnnnnnnnnnnnnnnnnnnnnnnnnnnnnnnnnnnnnnnnnnnnnnnnnnnnnnnnnnnnnnnnnnnnnnnnnnnnnnnnnnnnnnnnnnnnnnnnnnnnnnnnnnnnnnnnnnnnnnnnnnnnnnnnnnnnnnnnnnnnnnnnnnnnnnnnnnnnnnnnnnnnnnnnnnnnnnnnnnnnnnnnnnnnnnnnnnnnnnnnnnnnnnnnnnnnnnnnnnnnnnnnnnnnnnnnnnnnnnnnnnnnnnnnnnnnnnnnnnnnnnnnnnnnnnnnnnnnnnnnnnnnnnnnnnnnnnnnnnnnnnnnnnnnnnnnnnnnnnnnnnnnnnnnnnnnnnnnnnnnnnnnnnnnnnnnnnnnnnnnnnnnnnnnnnnnnnnnnnnnnnnnnnnnnnnnnnnnnnnnnnnnnnnnnnnnnnnnnnnnnnnnnnnnnnnnnnnnnnnnnnnnnnnnnnnnnnnnnnnnnnnnnnnnnnnnnnnnnnnnnnnnnnnnnnnnnnnnnnnnnnnnnnnnnnnnnnnnnnnnnnnnnnnnnnnnnnnnnnnnnnnnnnnnnnnnnnnnnnnnnnnnnnnnnnnnnnnnnnnnnnnnnnnnnnnnnnnnnnnnnnnnnnnnnnnnnnnnnnnnnnnnnnnnnnnnnnnnnnnnnnnnnnnnnnnnnnnnnnnnnnnnnnnnnnnnnnnnnnnnnnnnnnnnnnnnnnnnnnnnnnnnnnnnnnnnnnnnnnnnnnnnnnnnnnnnnnnnnnnnnnnnnnnnnnnnnnnnnnnnnnnnnnnnnnnnnnnnnnnnnnnnnnnnnnnnnnnnnnnnnnnnnnnnnnnnnnnnnnnnnnnnnnnnnnnnnnnnnnnnnnnnnnnnnnnnnnnnnnnnnnnnnnnnnnnnnnnnnnnnnnnnnnnnnnnnnnnnnnnnnnnnnnnnnnnnnnnnnnnnnnnnnnnnnnnnnnnnnnnnnnnnnnnnnnnnnnnnnnnnnnnnnnnnnnnnnnnnnnnnnnnnnnnnnnnnnnnnnnnnnnnnnnnnnnnnnnnnnnnnnnnnnnnnnnnnnnnnnnnnnnnnnnnnnnnnnnnnnnnnnnnnnnnnnnnnnnnnnnnnnnnnnnnnnnnnnnnnnnnnnnnnnnnnnnnnnnnnnnnnnnnnnnnnnnnnnnnnnnnnnnnnnnnnnnnnnnnnnnnnnnnnnnnnnnnnnnnnnnnnnnnnnnnnnnnnnnnnnnnnnnnnnnnnnnnnnnnnnnnnnnnnnnnnnnnnnnnnnnnnnnnnnnnnnnnnnnnnnnnnnnnnnnnnnnnnnnnnnnnnnnnnnnnnnnnnnnnnnnnnnnnnnnnnnnnnnnnnnnnnnnnnnnnnnnnnnnnnnnnnnnnnnnnnnnnnnnnnnnnnnnnnnnnnnnnnnnnnnnnnnnnnnnnnnnnnnnnnnnnnnnnnnnnnnnnnnnnnnnnnnnnnnnnnnnnnnnnnnnnnnnnnnnnnnnnnnnnnnnnnnnnnnnnnnnnnnnnnnnnnnnnnnnnnnnnnnnnnnnnnnnnnnnnnnnnnnnnnnnnnnnnnnnnnnnnnnnnnnnnnnnnnnnnnnnnnnnnnnnnnnnnnnnnnnnnnnnnnnnnnnnnnnnnnnnnnnnnnnnnnnnnnnnnnnnnnnnnnnnnnnnnnnnnnnnnnnnnnnnnnnnnnnnnnnnnnnnnnnnnnnnnnnnnnnnnnnnnnnnnnnnnnnnnnnnnnnnnnnnnnnnnnnnnnnnnnnnnnnnnnnnnnnnnnnnnnnnnnnnnnnnnnnnnnnnnnnnnnnnnnnnnnnnnnnnnnnnnnnnnnnnnnnnnnnnnnnnnnnnnnnnnnnnnnnnnnnnnnnnnnnnnnnnnnnnnnnnnnnnnnnnnnnnnnnnnnnnnnnnnnnnnnnnnnnnnnnnnnnnnnnnnnnnnnnnnnnnnnnnnnnnnnnnnnnnnnnnnnnnnnnnnnnnnnnnnnnnnnnnnnnnnnnnnnnnnnnnnnnnnnnnnnnnnnnnnnnnnnnnnnnnnnnnnnnnnnnnnnnnnnnnnnnnnnnnnnnnnnnnnnnnnnnnnnnnnnnnnnnnnnnnnnnnnnnnnnnnnnnnnnnnnnnnnnnnnnnnnnnnnnnnnnnnnnnnnnnnnnnnnnnnnnnnnnnnnnnnnnnnnnnnnnnnnnnnnnnnnnnnnnnnnnnnnnnnnnnnnnnnnnnnnnnnnnnnnnnnnnnnnnnnnnnnnnnnnnnnnnnnnnnnnnnnnnnnnnnnnnnnnnnnnnnnnnnnnnnnnnnnnnnnnnnnnnnnnnnnnnnnnnnnnnnnnnnnnnnnnnnnnnnnnnnnnnnnnnnnnnnnnnnnnnnnnnnnnnnnnnnnnnnnnnnnnnnnnnnnnnnnnnnnnnnnnnnnnnnnnnnnnnnnnnnnnnnnnnnnnnnnnnnnnnnnnnnnnnnnnnnnnnnnnnnnnnnnnnnnnnnnnnnnnnnnnnnnnnnnnnnnnnnnnnnnnnnnnnnnnnnnnnnnnnnnnnnnnnnnnnnnnnnnnnnnnnnnnnnnnnnnnnnnnnnnnnnnnnnnnnnnnnnnnnnnnnnnnnnnnnnnnnnnnnnnnnnnnnnnnnnnnnnnnnnnnnnnnnnnnnnnnnnnnnnnnnnnnnnnnnnnnnnnnnnnnnnnnnnnnnnnnnnnnnnnnnnnnnnnnnnnnnnnnnnnnnnnnnnnnnnnnnnnnnnnnnnnnnnnnnnnnnnnnnnnnnnnnnnnnnnnnnnnnnnnnnnnnnnnnnnnnnnnnnnnnnnnnnnnnnnnnnnnnnnnnnnnnnnnnnnnnnnnnnnnnnnnnnnnnnnnnnnnnnnnnnnnnnnnnnnnnnnnnnnnnnnnnnnnnnnnnnnnnnnnnnnnnnnnnnnnnnnnnnnnnnnnnnnnnnnnnnnnnnnnnnnnnnnnnnnnnnnnnnnnnnnnnnnnnnnnnnnnnnnnnnnnnnnnnnnnnnnnnnnnnnnnnnnnnnnnnnnnnnnnnnnnnnnnnnnnnnnnnnnnnnnnnnnnnnnnnnnnnnnnnnnnnnnnnnnnnnnnnnnnnnnnnnnnnnnnnnnnnnnnnnnnnnnnnnnnnnnnnnnnnnnnnnnnnnnnnnnnnnnnnnnnnnnnnnnnnnnnnnnnnnnnnnnnnnnnnnnnnnnnnnnnnnnnnnnnnnnnnnnnnnnnnnnnnnnnnnnnnnnnnnnnnnnnnnnnnnnnnnnnnnnnnnnnnnnnnnnnnnnnnnnnnnnnnnnnnnnnnnnnnnnnnnnnnnnnnnnnnnnnnnnnnnnnnnnnnnnnnnnnnnnnnnnnnnnnnnnnnnnnnnnnnnnnnnnnnnnnnnnnnnnnnnnnnnnnnnnnnnnnnnnnnnnnnnnnnnnnnnnnnnnnnnnnnnnnnnnnnnnnnnnnnnnnnnnnnnnnnnnnnnnnnnnnnnnnnnnnnnnnnnnnnnnnnnnnnnnnnnnnnnnnnnnnnnnnnnnnnnnnnnnnnnnnnnnnnnnnnnnnnnnnnnnnnnnnnnnnnnnnnnnnnnnnnnnnnnnnnnnnnnnnnnnnnnnnnnnnnnnnnnnnnnnnnnnnnnnnnnnnnnnnnnnnnnnnnnnnnnnnnnnnnnnnnnnnnnnnnnnnnnnnnnnnnnnnnnnnnnnnnnnnnnnnnnnnnnnnnnnnnnnnnnnnnnnnnnnnnnnnnnnnnnnnnnnnnnnnnnnnnnnnnnnnnnnnnnnnnnnnnnnnnnnnnnnnnnnnnnnnnnnnnnnnnnnnnnnnnnnnnnnnnnnnnnnnnnnnnnnnnnnnnnnnnnnnnnnnnnnnnnnnnnnnnnnnnnnnnnnnnnnnnnnnnnnnnnnnnnnnnnnnnnnnnnnnnnnnnnnnnnnnnnnnnnnnnnnnnnnnnnnnnnnnnnnnnnnnnnnnnnnnnnnnnnnnnnnnnnnnnnnnnnnnnnnnnnnnnnnnnnnnnnnnnnnnnnnnnnnnnnnnnnnnnnnnnnnnnnnnnnnnnnnnnnnnnnnnnnnnnnnnnnnnnnnnnnnnnnnnnnnnnnnnnnnnnnnnnnnnnnnnnnnnnnnnnnnnnnnnnnnnnnnnnnnnnnnnnnnnnnnnnnnnnnnnnnnnnnnnnnnnnnnnnnnnnnnnnnnnnnnnnnnnnnnnnnnnnnnnnnnnnnnnnnnnnnnnnnnnnnnnnnnnnnnnnnnnnnnnnnnnnnnnnnnnnnnnnnnnnnnnnnnnnnnnnnnnnnnnnnnnnnnnnnnnnnnnnnnnnnnnnnnnnnnnnnnnnnnnnnnnnnnnnnnnnnnnnnnnnnnnnnnnnnnnnnnnnnnnnnnnnnnnnnnnnnnnnnnnnnnnnnnnnnnnnnnnnnnnnnnnnnnnnnnnnnnnnnnnnnnnnnnnnnnnnnnnnnnnnnnnnnnnnnnnnnnnnnnnnnnnnnnnnnnnnnnnnnnnnnnnnnnnnnnnnnnnnnnnnnnnnnnnnnnnnnnnnnnnnnnnnnnnnnnnnnnnnnnnnnnnnnnnnnnnnnnnnnnnnnnnnnnnnnnnnnnnnnnnnnnnnnnnnnnnnnnnnnnnnnnnnnnnnnnnnnnnnnnnnnnnnnnnnnnnnnnnnnnnnnnnnnnnnnnnnnnnnnnnnnnnnnnnnnnnnnnnnnnnnnnnnnnnnnnnnnnnnnnnnnnnnnnnnnnnnnnnnnnnnnnnnnnnnnnnnnnnnnnnnnnnnnnnnnnnnnnnnnnnnnnnnnnnnnnnnnnnnnnnnnnnnnnnnnnnnnnnnnnnnnnnnnnnnnnnnnnnnnnnnnnnnnnnnnnnnnnnnnnnnnnnnnnnnnnnnnnnnnnnnnnnnnnnnnnnnnnnnnnnnnnnnnnnnnnnnnnnnnnnnnnnnnnnnnnnnnnnnnnnnnnnnnnnnnnnnnnnnnnnnnnnnnnnnnnnnnnnnnnnnnnnnnnnnnnnnnnnnnnnnnnnnnnnnnnnnnnnnnnnnnnnnnnnnnnnnnnnnnnnnnnnnnnnnnnnnnnnnnnnnnnnnnnnnnnnnnnnnnnnnnnnnnnnnnnnnnnnnnnnnnnnnnnnnnnnnnnnnnnnnnnnnnnnnnnnnnnnnnnnnnnnnnnnnnnnnnnnnnnnnnnnnnnnnnnnnnnnnnnnnnnnnnnnnnnnnnnnnnnnnnnnnnnnnnnnnnnnnnnnnnnnnnnnnnnnnnnnnnnnnnnnnnnnnnnnnnnnnnnnnnnnnnnnnnnnnnnnnnnnnnnnnnnnnnnnnnnnnnnnnnnnnnnnnnnnnnnnnnnnnnnnnnnnnnnnnnnnnnnnnnnnnnnnnnnnnnnnnnnnnnnnnnnnnnnnnnnnnnnnnnnnnnnnnnnnnnnnnnnnnnnnnnnnnnnnnnnnnnnnnnnnnnnnnnnnnnnnnnnnnnnnnnnnnnnnnnnnnnnnnnnnnnnnnnnnnnnnnnnnnnnnnnnnnnnnnnnnnnnnnnnnnnnnnnnnnnnnnnnnnnnnnnnnnnnnnnnnnnnnnnnnnnnnnnnnnnnnnnnnnnnnnnnnnnnnnnnnnnnnnnnnnnnnnnnnnnnnnnnnnnnnnnnnnnnnnnnnnnnnnnnnnnnnnnnnnnnnnnnnnnnnnnnnnnnnnnnnnnnnnnnnnnnnnnnnnnnnnnnnnnnnnnnnnnnnnnnnnnnnnnnnnnnnnnnnnnnnnnnnnnnnnnnnnnnnnnnnnnnnnnnnnnnnnnnnnnnnnnnnnnnnnnnnnnnnnnnnnnnnnnnnnnnnnnnnnnnnnnnnnnnnnnnnnnnnnnnnnnnnnnnnnnnnnnnnnnnnnnnnnnnnnnnnnnnnnnnnnnnnnnnnnnnnnnnnnnnnnnnnnnnnnnnnnnnnnnnnnnnnnnnnnnnnnnnnnnnnnnnnnnnnnnnnnnnnnnnnnnnnnnnnnnnnnnnnnnnnnnnnnnnnnnnnnnnnnnnnnnnnnnnnnnnnnnnnnnnnnnnnnnnnnnnnnnnnnnnnnnnnnnnnnnnnnnnnnnnnnnnnnnnnnnnnnnnnnnnnnnnnnnnnnnnnnnnnnnnnnnnnnnnnnnnnnnnnnnnnnnnnnnnnnnnnnnnnnnnnnnnnnnnnnnnnnnnnnnnnnnnnnnnnnnnnnnnnnnnnnnnnnnnnnnnnnnnnnnnnnnnnnnnnnnnnnnnnnnnnnnnnnnnnnnnnnnnnnnnnnnnnnnnnnnnnnnnnnnnnnnnnnnnnnnnnnnnnnnnnnnnnnnnnnnnnnnnnnnnnnnnnnnnnnnnnnnnnnnnnnnnnnnnnnnnnnnnnnnnnnnnnnnnnnnnnnnnnnnnnnnnnnnnnnnnnnnnnnnnnnnnnnnnnnnnnnnnnnnnnnnnnnnnnnnnnnnnnnnnnnnnnnnnnnnnnnnnnnnnnnnnnnnnnnnnnnnnnnnnnnnnnnnnnnnnnnnnnnnnnnnnnnnnnnnnnnnnnnnnnnnnnnnnnnnnnnnnnnnnnnnnnnnnnnnnnnnnnnnnnnnnnnnnnnnnnnnnnnnnnnnnnnnnnnnnnnnnnnnnnnnnnnnnnnnnnnnnnnnnnnnnnnnnnnnnnnnnnnnnnnnnnnnnnnnnnnnnnnnnnnnnnnnnnnnnnnnnnnnnnnnnnnnnnnnnnnnnnnnnnnnnnnnnnnnnnnnnnnnnnnnnnnnnnnnnnnnnnnnnnnnnnnnnnnnnnnnnnnnnnnnnnnnnnnnnnnnnnnnnnnnnnnnnnnnnnnnnnnnnnnnnnnnnnnnnnnnnnnnnnnnnnnnnnnnnnnnnttcccacagacggcgccaatgttctgtatagtttctagaacacaaatgtacagcacgaaagcgctgtatgattactgtttgatcactctaactccgcaactatgaagatatcgatggtgaacgatatcccacagtagatgatcactgagatacacgaaattggggtggggtgtgtgctcagtgtaattgaaagagagagagagctagagtgtgtgtgtacctttcaccaacgagcaagtcatatttatagatagaatacctgaccgttggccaactgcatcgtgcacgagtggttcctatattcccggcttttacctgcacgttagtaactacctgagtggactaagtctttagtccatgttcattgaatcccaatatcaggccacgatcagtttacatgtcgcccactaattgggccttaacctaaacccaattgtggcccccagaacaatatctattaataatctattttgtttctttaaattcatttttctaatttcagatctaataacttagacattttctattttaattcttgtaagatatttaatttatctatagtctatataactttatatatatatatatatattttttaattttggtccctataaacacaaagttatgggagttataaataaaaaatcacaaaaagctgaagagtagcaacgacaagaggatggtatttatgtttatcctccgtcttcacatgccatatttcttattgtaatcttctttttctcttcactctctaaattagtattttttttatccataaaaatagaaaattatattaagatttataacattctcatatgctcctcaattaactcagatacatatccttggtattattttaaagttgaccagcattttcaatcatacttgcaagacgttaaaagtcacatgtccgatttaacttcctaaaaattggtgtctcctttaaattggtgcaaactgttgaaccaataaaaaactagtaataacctataaaacccgatagattaatctgtttcacttaaacttttttttaaaataaaaactttcaaaatgacatttttttaaaaaattataacttatgacattttaaatgaaatttacttttattattattgatttatgcatattattattttttcaaaattattaagttattatattaaaatctatttgatcctaatttgattttgattgaattattaatccttgaattaatgtcttcgatgaccggtccgattctaacagctcccttctgctggcagattagcccagttctctgtcttttgttgctttgttgccgtttcttctctgattttatgggcttagcttagacttcgtaagcactgggttttcatcccttttacgcaaaaaaacaaatccagtctaagtgagtacgaataaatttggtagaaagaatttgttaatcccattatacttaatatttagcaagcattttaatttgtgtgttgcttaggataagtgtttgttttaaattcattacatgattaaatttataataaatgaataccttgaaatatatataaattatatcttagatttataatgaataaccattgacaattttgttaaaaacaatctattgaaatttaatcaagacataaagataaaagatgttagaatacaatattataaaaaagtttaacaacgattttagaaggacttcaatgacgatttttcaatcaatgtttaaacaattgtcattggcttttgatgatggttttccaaaatcattataaaaatcgtataagaaatatctaatatcaacattttcaaaaataattttgagaaaaatcaatgtaaaatgtctcttttcacgataattttgcttaaaactaatgtaaaaaatgcactttataaagacaattttgtagaaaattattctggatatagagatctacatcgattttttggcaacccatgtaatttgtgcaactttttccaatgttggttttgttttgacaacaaatccaatttgtaatttcaaacataaccaaactcagacagtttataacaaacatatataattatattcaaattattatcgatcaaaaacaataaattcaaataccaaataaaatgataccacattatccaattaattaattacattaaacaaaaaaattcaacatttgtcatgtttataatataaattcaacctaaaactattctaaaatacaagtttaaccatcatatacattttcaaacactgttcattgcttcatttctaatttttaaaaaagatcttacccattttttttgaattgttttattccttgcaatttcaatgatgtttaatcactaaatcactacaacatataataaatacaagttaatcacattgaataatcaaaagtctaataaatgaaataggttaaaacaaactagtattttcttataaaaaatcaataaaatactatattaaataataagaagtgtaattaaaaggatagaaaataacaaaaaaatataaaacatacaaataaggataaaataatataatttgagatgattgagagattttcttaacaaaatgtaggagtagagtgtggaatgcacatttagaccgaagaatagaggaaatattgaaaatgtctaattaagagaatggaaaaaaaatatcactcattaagttgtgtattctaatttataatatataaatagataaataaaaatttccaacaaaattaattcttcataaagtttggcatattaatcaacatcatcttgatttttttttcttgcttaaattatatatacctatccatctttataaaatgattgtcagcttttggttgattttagaggtggcatgggttatgggtacatatgagccttggttttcggctttgcccatttaacatataaccgaccaataaattattgttagtcctttttaaaaaagatattattgttacgtattttataactcaattaattcttcattttattttctttataaactaattgattatattccagttttattcttcattttcttacccatattttccccttgatctcttcctatttctttccctcgaaatcccaaacacacacttaactccaaatatcacaccctataaagacaaggatatacaattattttgaaattatagtaggaaataattttgctacaacagttaaacatatgtataaaatatagaggaagtatattattatttgcaataaagtggtccctacagaaattttgcaccagaaaaagaattgattaaacatgatgtgagcaaatgcatgaagggccaagcagaacattcatagtgtgtggattgtcggtagtactaaaccccattggccactggatggtgaaaggccaaaagtatgactttgttgctctgaaagaaaggcatgcatgttgtttgaaatatattaattatatagatatgtgtatgaagaggacgacgtagttgtgaggagaaccatatgtcttcttctgtcttagtctcaaatgggtagtaaagtcaattctcatggatctaccgagcaacgaccatatctttattccttgctagccctagattttgaaaaagcaaatgtgaataatggttatatgcaaaattagaaagcaacctagcctaccccaccgttgtaaggtatttattgattaatataacattacgtgggattttcagttttgcttgtgcatgacgagtaaataacaaccctagttcaagttcaactcacacacgtacttgttgttttcatccatatttcattgcatgctgcaacctatacatgaggtgtctgtgagggaaatgatattcttcacgatggaaatgccacatttgtctttcatttcaatatgattttgagtaatgttttcatttccatttcgggtatgttgtgaaagaagaaagaggacgaaaaggaattgttttctctagcttcaatgttttattcctctggtcctcagtttgcataaactttccttattttggtttgacttgtatataaactttaccccactaattgtggaacatattgtcaactaaagaacaaaacgcatcccactttggttgatttttgggctttaatttattctagctttcaggatcttatctcgaagaattaaatatttgacattaaaatcaatatcttaaatatcaacatattgttaatattatttgtataaatatactttatttaagagataaaataagtataaagtgaatgaatgaaattataaataaataaagaattattattctaattcatgagtatctaatttttaacatctttatgcattacttgaattcctgttttcttccccaaattaaagcttgaggtggtaaactaactgtttctaatgacaatgagctcgtggtaaactttacttaattggtccatttttttctcttcttgtcaatcttttcatattttttttacatatttagcttgatttattttaaaaataaccatttttttgtcaatttcatgagattttaaaaaaaaaatccttcgtgaaattattcattttcaaacacgttagtttacactgtttttcctaaagtgacatgttgtttgtaagatcttgatcatctatagttgaattgtatgaaagtccagtgaaaaattgtattcatacaagaaaactaaataatttttttattatcagccgccaaaggtaaaaaattatacaacgttttcttttctctctatcacttatctcatttttttattgtctcttcatttcttatttctctcttatttataaataaaagttgcataagttaatttattgtataaatataatttctcagcacaactcacatgtgacaaataaaaagaaggattagaatcacatgttgtctttaaacaacacatgcgtccaaggaacaaattaatctcctctaccaattaaagcagttaggtgaagtttgaaaattgattgttttttaatatctttaaagagttcaattatagaggattcaaatctaagtttcttgtatatggaccttttaatatgccagaaggaaaaagaaaaatatttatgtgnnnnnnnnnnagttaaattttcaaattgttgtgtgcagcgcatatgtgagaaaaattattagataattttaaattattatttatttatggtctcaatcaatatttatattcatataacatgtatttaatttttcgaatttaagaaaaaataatcagtaatatttaattaagtgtcatatagaaattaatcatgattatgaactaattaaatgatgatcctaaattatctaataatttctcaagaataagattattacaaattatctttatagtttagaagtcgatctatttgtttggaaatatactttttgtttatctcaatacaagggctgaatacaggtagcgtcctagaaaaattaagatcaaagaaaatagaagaacacacatataaacttaaaaaaaatagattatttaggttttgctaaaagtttagtcatctatatatgagcgatcaccaatgcatatagtcaagaattagttcaatggagaagcttacgtagtaatattttttttattaataaatagatcatatatataaatataacgtctcaacttaattaactttttttactttattcataaaaccaaataaactaatataagtccataaaatattaaaaaatttctttctgtttttttcttcttatttccatattcatttataaacgtttatctcaaataataaaactgtgttgagatctctctgttatatttgtttttcttatcttaattcatatcatctacttgaacactttgttactactattataatttactgtatatatctaaattataaataactattacaaaggagggacatatcaacaaccacaatctccttttgtaaaggcaccctatgcctatgggctatgggatagggaacttcttgtgcatttcccttcccgggatcttcgactactgtaaaagagcaatgatacagtatatatatacataccacaccacatggttgggtccattattatagccccacctttgcatcatccccttcccggttgtacttcctttatgcatgatagatgtaattaattatgatctctgaataatcctcagttactaaaactaatttaattaaaattaatgatattaattacaatgacaatatgtgtctcacaagtctcttaattatcattatcctccattccttatcaacgactcactttctatgttgtatacgtatcttctattgtctataactaattgactttaataattatttaactttcttaggagcattatttaattttaataattatttccatggaaattatgtcaaaaaataacttttaatttagctatattttattttatcatatttgcttgtttttatttattactagataaaaataaattctactttatttcatttcatatttcaaaaattaaattaaagtaaatcattttaataatttattatgatatctaaactaaaacacacttatttatgtatcaagatttctgtcacaatatttattacgcactggaaactcctgccaaaacttgagatggaataaaataatttccaaaaagaagaaagtgacaaatatccatccctatttctgtatgatatagcttttagccatagggatatttttagatcacaaaattatgaggtactgtaattttattttattcttgtcgggtttatatgtgatctatggatttttttttatatcatttacatataaattgagtttaattaacaagatagcaatttaattcaactcattcttaattatatgatgcgtgctacgttttttagtaactatctttgaatttttactactattagattgttatttaatctatactaagtattgtttattgatttataattaagagaacttgtttatcaccaccataaatttctctgtattcactagatgcatgtattgttaagtttaagaaattcatgcctataagtaacaaaaaaagagattttgtaaagaatctatgcacgagttgcaccaaagtatatcacgtaactttctctgtcttttgaaaacaatctatttgtctgaaacctaagtagaaaccaactattgtaattaaaagtttaacgccgttttttgagttctgttatgtcggtagggactatggacaaatatattttttttgttagttaatttatttatttatttatttattggtgattcactctctttcgcttttaatttcttgggttaaagcagaaaatggcaggaatgtggggaaaaaattggaggacagcgacccgattttctctcacagcaaattgagaaatgagaatagtttgccctcgcatctgatgcaaattacataattatcaaattatgttatgttcctcattctttgaggtactggcaaatgaaaagaataacaacaatgctatatatgtatctttataatccaatcacatggtgtgttagtgggggttgcggcactgaactggtgaagcacgatatattatttagataattttacatttatttatgaaattaatgagaatagactttcactttaattatataatagtacgtaatataatgctgctctaaaatgacaaaactatttgattttttcggtggaaattgtttgaatatggaaaagtgactgactatcgttaccatcgatgcagattttgaaagtgaaaatcaacagcaaaagtacttttaggtgtgcaacgtactttttgggaaaaaaaattccttgaaataataaaatagaacgataacaaataaacaaaataaactctatgtgttagaattttcaagtactaagtactaccaaacaaacatgcatgcttttaaaacaaaatatgaaattacacattgaggacattttaaggaatatgttttcaataatatgccaaaattatatgatataatcttaaattcagtttgtctgatttaatagatcttaggtgtccaagttcttcaaaaaaggtagtttgtgttttatttccataaacaaccatatgtctatatgaagagttgataagataagtgatcgccaatagttaaaactatgtagaggaatactaataaaaacttcaagtaaaaatatatgaaaaacgatttagatcctaaatagcatttttgaagaattggttttttgacaaaacacgatgatatcttttgattcatgtaactgattccacctagtggaaacgggcttttgttgttgttattgttttaaactactatatgattgcataatttagtagcatcatcaggtacattttaaacaaaagtatatatatagatatatatatatatatatggaatcatagaagccaattagttaccttaaacatgattatgctggcaaagatggtgaatgatgtaaacatgacatannnnnnnnnnnnnnnnnnnnnnnnnnnnnnnnnnnnnnnnnnnnnnnnnntatatatatatatatatatatatatatatatatggaatcatagaaggcaattagttaccttaaacatgattatgctggcaaagatggtgaatgatgtaaacatgacatagtaaattggtgatacaactgcagttttaaaggtgtccaaagcctgaaacatgattccaaaataaataaaatagcattacaatataattggtaggtgataagcatattgtcttaaacaactaacccggcacacttatttgaatgattctaacattattggttttatttattaaagaaagtctaaaaaccaatactaaaatgaagttcaattgtaagttagttggaaatccctactgtaaaaaatatggcatgccatttctgaaatattgcatgttacgtattactcatgtataacggcaaaggaaaggaaatgaaatagctcaatgccaattaagaaaagcaatacaaaatcttttgtttataacttttccaaatgccacgaactagattagaaatgcaaacatggtcatttagataatgatagaagtctcaaagattgcaaaagcatagttaaatttcttgagcattacaaattaccacctaatcactaaggtcagaaaaatcaaaatactgttttcaacattagcactccaataaccaataaaaaaaattaaaaatatatttaactttgacataattattttaagttgtactttggaagacaaattacaatgactgccaacagtaaatgtactaatataagtaagtcaaagtttaccttgttcaagtagttaatctgcaaaagacaaacatcctattacaataatcataaagaaccaggtctgaaagtaaatgaattggttgttgccttcaaatgttaacttcatagctattgacactgctttaacactcacgacctatgcaacaaggaacaacattaggtttatagagggtagttttattgtgacctacatgacacatatgagcactgaacacataatcgatataccgtaattgagcctgtgagagagcatattccgacatatataaccagataggttggcccatatcgagaacacaatagaaaataaggatgcaaaccaaccacaactatacacatgtagattagaaagcctgttgatgaaggaaagaactcaatgtcagtttcattaaccataaatgaatgccttgaatctattaagatcttaatatgcatcccactcatcttgtatcctcctactttgattttttacaagattcaatggtaaaagatatgttgaaaccaaacaatcaggaattgaaaattacctggttctgtagcaagttgccacacttctttaacagagtcaataactcttacatggggagcatgcaacacaatatttgtagatcccaccatacaaagagcacatcaaatatgtgcaacctctcttttaagataaagtgagctaatattgcactgcatcatgatattagtttgtaactttccaaaatgcaagccgcatccaaattaaaatttaatggatgaagatgtgcatccacatttgtgtcaaagaaagcagaaacatcctaataattaatgttatgaagaatagcatgttccttacctgaaaatgatacttaaagctcccaaaggagttacaagtagtgcaggagcaaatgcataagctgcaaaattggctacttctccaacaatcactacaaaaatgaaagcatacatatagaattagttgatgaaattttcataagattgtcggggacattagcaaattagttatttatagttacagattactaagagttaattgaaaatttgctctatgaaatttatatgtagcacaaaatttatatctatgaaatttatatgtatgtactaagacatttgaatccaaagtcaaaggaaacattgtcaaagtagtagaacttaaaattaaaagtaataaaaataattttgtcttagaagaattaaacttaaatcagttgggttcaagaatttttggtagtccactagacttgaaatgtgatagaaattattctgcatcactttatcttttttcaccctccattataatcctaattgtaaaatgtcaaattagctgataaagacaacaaatgagacgccttttcaacacaacagaaaaaaccatatatcatgaagtaatacaataaatacaaacagataattaaagatgaattagatcaaacatgcaatacaattggtcacaagaaatcccctttaaataaaaataggtagcttatgattaggccttgtcaaatgtgttttgcaggtaaaatgctacatgatatattataatttagtaaatgcagaaccaaaataatttttaaaaatcacacactagagatcattccaaaccacttccaaggttcatatatatatgcatgccctcccgcacctgatcaaattaaaacaaaataaatatatatatatatatatatatatatatatatatatcaatgattaaagaaagggtaattaacacctagcaaaccaaaaacaaaaatgtgaggaaacatgaacctgctctcgacgcgccgttgctcgccaagctcttcgacgtcgtttctctcccacgtcctccacctcgcagcacaagcgggcgtccgctacgccatgcagaacccccaatcctcggcttcgtctcccttctagaagcttccaaaaactccaatccccatccctccatcgtttgggcctcctccagttccgtctatgggctcaataatgaaagcccattctccgaactccaccgtacagaccagcccaactttcacatttcatataatatgtggcaatataatattctttcttgtgtaggcacatgcaactttaacattttcatttttacatttctcacatccctttctctcctaatgttcctttcttgtgttgaacttgcatgcttctcattgccggtaacccgatcatggataacagtttctatacaacataaccaaaccaaacgaatatgttcatactattaaaataggaccacaacttcggttaaggacaggcatgagatctcacatcttttaatgcttagcacacttcaaaattctgcctctaaaaacaagagaaatgaaccagtcacttggatacacaggctcaaattatacatcatgacctcaagaaagaaaattaatgactcctcatattaaaacagaccacaacttccgttaaggacaaacatgagatctcacatcttttaatgcttatatcccacttcaaaatgctgcctctaaaaacaagtgatatgaaccaatcacaactcaaattatacattatgacctcgagaaagaaaaaaaaaatcatgactcttgcacattaaaacagactacaatatctgctaccattaaagaatcatatccatgatgaaattccaaaaatagaatggcggcaaaacaactttgtattatgtcaagaaatatctttaataaagcattagctattaagaagataggttaagaaaatattttacagaagaatgtgtgaattgatattattgataataaaactttgaactaataggttacaaagtataacaaactagataagatgaaaccaaaacaactagataagattaagtgtaacaaactaacaacttgcctatatttaaaatacataacaaacaaatttaaaatacaaagatataaataagattaatctcccataacattagcatctaaactcaaccaaagaaaattgttttatacaatgtctcgtcatcacaatattcaaatccactcatttctaaggagtcgtgttgtttgatggatcccctgaaaattgctgcagaatcaatttcagctgttgttgtatttcattcacctgttcttgaattttttgcattccatgaacttgttgatatgcactatcagaattttcaaatcccctcatttgatgagtcaagctgttttgtggattcagcggcaacatttgttgtttttgttgcatttcgtgaacttgtcgaatttcaggaagagaaattgaattttgtaaatcaatgatgtaaggaactccaattttataatgtaaggatatgtcatgaatgctctttctttttttctgtgtgagtgaggcattttggcgaagaaagtatttttgagcgtgactagcgatttgaataggagattttgttttcacaaggcttgaaatttttgtccattgtcccttcccatatttttggagtccaactaaaaaagacctgccattaaaaaaacaaatatgagatgagaatttgataagttttcattcatttactgcattaaaataatacaacgttaaaagtctacatgtgttcttcttcagtccatgcctcccctctccctctcttgcgccgaaccgatgaacctgcagcattctgcatcatggaaccaccaccaccgttatgcaccagcgcctcaactgggtggctgggcaactcgaccggagccgagacagtctggttcacgtggtgttgggtgtcctccgccagcgacatgggaggaaccggagtagcaaggttccgcgtcgaccagtcatagagggtctgccacggctcggtctcgaaatcaaataagcgagtgtagtcatcaaacccagacattgttttcttctttcgttttcagagttgaagtttcaaactttcaagtcaatgcctttcttttcgttgacacgggcttcttattcaacgccctgacgctggtttctttgaaaatttggcggcgcaaagtggcggttctttaaaaaaaaaaaattaaaaattaaagaattgtgttatggcattttaaaaaataaaggacgattgaagctttccaaaataataaataaattataaatcttctttgaatttgaaaatatttcctatgaaaatcttatcattttaaaacttttttgaatttaatatgcaaacttaataatttttttcaatttgatattcagttgaaagtcagttgaaatttgatattcagttgaaatttttttaatttgatattcagttgaaaacctttactatgaaaatcttatcatttccaatataatttgatattcagttgaactttttatcattttttgtctttcaaattgcttattcaaagataaaaaaaggtttatcttaataaatttacttatttaaataagcaataaatgatcaattatttagaatgcttaattaagccattttattttcaaaagcctccgttaagttctttatttttttaaatgatgtctcaatgtgatattttattatttaaaaatacttttatattattcttatggttcaattcaggatgagatgttaagttacaatttttgatgagttttaatgtatgaaaatttaatcggcattatatttatcatgttttaaaaaaataaaaaattatactaaaattgtagatttgcatgtcaaaatcaagaaaatcagagaggcggaaattaaaaatatttgcatctacatatgcttgttaaggaaaagagtaaaaagaagtttcactccctattgaatttactcgcaaacaattttcgcatctagatgtaaatgccttagcaaacacttgtttattcataaaaacattcacctctcaaatgttcctagggatggtaaaatgggtctggctcggtgggctggcccgtttaacccacaaaaaaatgtgggctgggttgagactttgagcccacattcattaaacgggcgcgggccaacccggcccacaaaaatgtgggccaaatgtgggctaggggtgggccagcccaccgggccagcagcccaccaataaaaaataataaaatatttaataggtaattaaatgagtgacttagagggagagtgactaaaaagaagttaatgattttgaatccttaaccctaatacatttttatttggaacctaataatgagctatactacatatacaattatgttttgattgtctgcatcattgtgaaccaaatttctaagaatttgttaagacttaggagttaattgaaaaccattgttaaacatgtattttgtgcttgcttttacttctattaggcatgtattatatattaaaaatcattgttataggattaagttagtacattattaatttttagtataaataattacatttgaatttttttaataatttattttacctttttaaaaaatatattttttttttattttttaagtgggctggcccgctggcccactaacccactttaaagtggggcgggctagtattttcagcccactttgcaaaagtgggccagccggcccgacccacttttttagtgggttgggccagcccggcccgtttttgggtgggctggcccactttgccatccctaaatgttccatcataaatcatataccatagatgaagtattgacccttaaaacacttgtctggtgtcgttggtgctggtttagttttatttttcaaaataagaaataaagtggctgttttttatagtttaatttgattaaaactattgaaattttcacttaatgccttcatgctaaattgaaccgaaagaatcacattaaaataaataaataaacaaagaatcgtgttatggcattttaaaaaataaaagacttgatagaaactttccgaaatagaaaatccttattaaacattataaataagtgttataaaaatcgattcacacccttacctctaacaaaaatcaaaatgttctttctttcattaatcctcttaattatgtaaagattagacaaattacattgattataattagttacattacaaatttattactagtatattttcaagcatatagattatattataagtttatgataaatgataataaaatgttatttttaatattaataatttattctaaaaatattgaaattcaatttaaaaataaagataaaaataacggattgaaagagataagacaatattaataaaccgttgaagaaattttttatatcataatatgaattatttatcataaatctaaaatgtaatttatatgttactatctactaattaaaaactaataaattctaaattatttttattaaaaaagaataatcattataaatatttaatataaatattttaatattatctagagatcgacatggaattnnnnnnnnnnnnnnnnnnnnnnnnnnnnnnnnnnnnnnnnnnnnnnnnnnnnntcaagcatatagattatattataagtttatgataaatgataataaaatgttatttttaatattgataattcattctaaaaatattgaaattcaatttaaaaataacggattgaaagagataagacattaataaaccgttgaagaaattgtttatatcataatatgaattatttatcataaatctaaaatgtaatttatatgttactatctattaattaaaaactaataaattttaaagtatttttattaaaatagaataatcattataaatattttaatattatctagagatcgacatggaattttattataactgagtgagaacaaaaatcttgaccattaaatcaaatcatgaaatattacaactaaaaaaataaaagttatgttattttattttaagtggtgccgtaattattaaatttttaatattaatcattgatgtataattgtatatttttaatttactcttttactctcttatagaatacaagcactactcatttaattaacttgatgtatcatgaatatattgagaaaggggagagagatattaaactaaaaaaataagataaatattaaccagtgacctaaagaaaaagataaaaggattttcttattaggatacctagaaatatattttcctacaaattttaaatgagttttcatataatttttaataaaaaaatttccttttaaattcataatcagtaccggaaagtaagatcgaaaaattaataaaggccctgcaaaaaagaggaggccaacagcatcttttggtaacctcttccttgaaccaacggtggcctcatgcaattttattaaaaggaaatccattctcatttatttcaaagctttagtggcttgaaagttgaaatcactataaaacaaactaagcatataaaatgaatatatacacacccgtgcacacaaaagaacaaaattgtcgtgcttgaataatgagaatgttcaccactacccattaacttctcatgggtcatggcgtacgtccccgttagattttaattcaatccaatcataatttccaaaaagtgattatatgtgctttatgcctttatcctatagtatatcaacataaatggttaaatgttggataaattatggaggacgtgcaagactcttgtccactaaaaaaaagtcatctcatcctagtgtactacaaggttaaggttagggcctcgtacaatccaacccacctatcttaaattcatttatcttttgaatggatttatttgattgttcatacaggaacaagagaatgcgtgcaagctatattaacactcccttttgggattcaactttggaagcttcctctaactatttgtagtaacttaaatggacaagaaaattaattgatgggcttctaccactggttaagctaagttggattttttgaacatgggagctgcaatgggttatagcattacatgcttttttgcctcatatataaaagagagggggtgtgtgaatgttacatgtatatagttgcttcagtgacaacgattaattgtatatatatagctgctttatgacaacgtacgtttttcatgttcattttccttatgagaggttaccatcctttgactgagatgaacaacctaaaacataattcttcaatggtttaggacatgatgaacacaatagatactgcatgcagcttgagctttccgatcgtgagatggagagattcttgacttttgaagatttatacagttagctagttctacatgaggaatgtcttaacgggatgatttcataacaagttggctaaactacccatttgagcacaaagcacgaggtctcaaaatatttttccatgatttcaaaaataaaaatagtatttataatttgaaaaccatcaataattttgtaataaaaaaactacattgtcaataattttggcatcagcggagtaatttcatatgactaaaaactgactagtgtaggacatcatgggtattgaaggcaacacttaaacatgtagtattatattagtttaacaccgttaattaattgaaagttgaaaccacggttagattcaattaataatggttttcatttcagtagggatggcaaacgggccggcccgcaaaaaaacggggcgggccggcctggcccgcgaaaaatgcggggcgggctggcccggcccgcttttggaaagtgggctacaaatgctagcccgccccgcttttatgcgggccagcgggctagcgggccagcccgcaaaaaaattaaaaaaaataaaataagtcaatttaaaaataancaaagttaaataaaaataaataatttaaaattaatgttaaataaatgatgtcatgtgataattcacaaaattataccatttgtaaatgaaatttacgattataaacggttcaaaagtgtaatatgctagtaataaaagactatttgaaagtatcattatcataatcattttaatattaaaacttagaagttaattatgagagtgcaaaagagtataaatttaaagaatatacctatttcaaaacatgttaaatatatttatttaattttaatatttaatatttaaataatataggccctgcgggctggcccgccccgacccgcgtttggcccgcaattttgcggggcgggccagcccggcccgtttttgatttgcggattgaaattatcaacccagcccgcgtttttttgcgggctacgcgggccggcccggcgggccaagcccgttttgccatccctacatttcagatattaaaatgatgatgatcagatacaactgtataatagaagttaaaaattgacatctcgagaaaatttcacttgtaagtccacacaaacaaccgctcaatcagcttcctccattgataagtccaagtgttggattcacaggtcctaatgaaaagacaaaaaatccaaattaaaaatattaacagatacgttttcttttagaatatgtaacaattaacgatgaaacaaaattttgaatttataatgttatgtgaagtactgaaaaatgataataaaataaaataaaatataaatattttacaaaccgtgtctcactagaaatttgacacgtatgtggataggtagcagtagtgacaagctggggtaacgccacctggaattgtcgcagtggtaatgggaaccaaccaatgcacatgacttggcttttcatgcatttttcttcttaactctgtaatacacttgttcacttggcgcgtgttttcacgttagactaactttactggctctgggagtgtgattagtttaatctgataataatttatttcgagtctaaaattatatttagatgattttttatatatttaattttatgttggacaagaatttaaaattaattcatgtttataatttattttaattaaaataaattatacatctctctcataagagaatataatacatattttttctttttacaaaacttatacatatttttcatgaaatttaatatgtgtttggatgatatatttaaatcggataattcattttgtaaagggaatttaaattcttttgagggaattgacttgtttgtataaaacatttaaaagcaaattcaaatgcgtatttttatctaacaatttaattatattaaatcagtcaacattaaaatactcccaaaaaatagagtttgaaattttttccagagatactctaactcaactctcaccctctgtctagtgactccacatttgggagagagagagagaacgatgctgatagtgatgtcacacacggtggagagagagaacgaaagttacagtggtatcacacacaaaagagaacaatagagaacagcaacaatactgtcacacgcgaaggagagagagatcgatgggtatgttgcacacagaggagagggaaatagtgatgtcgcgcggaggagagaaagaatgacggtgatgtcggtggcgggacgcgacagtggcaatgctgattggaggtggcagcgtgaaggtagtcagtgatgacgattttgattggtgagttggtgtaggttataaggaaggaggaaccaagaaagaaaggttatcaaaattttttattattttttttatttttgaaaaactattatgaaaacttattttaaaaaatatatgattttcattttgatcgatgaatatagtaaaaagtaaatctccattttgtcactatttaagaaaataaatttgtatttatcttcatattcttgaaaaattataaatttaaaaataaattgttacatatgaaggtattgaattatttcatcataattaaaaatttgaattgatttatccaaacaaatcatatacaaaattaaataattttaaataagagcaattcaaatatatggtatttcaaattctttagaatttgaaaatccctcatccaaacataatattaaggaaattgcacatgcctctcttttattttttaaatttatacaaattttctaaatgttgtttaaatattttttgacattgacaagcatgtgcattgataattttgataaaaaatgactaaaatgtatttttcattttcataaatatggaaatgttctgagacaatttttcgagaaaatcgttttagaaattggatcttctaagacgatttctcccataaatagtcttagaagcatccatccttttttagataacaatttataagataattctcataaaaaatcgtcttaaaatgtagacttttaaagatgattttttgtaacaaccgtcttataaatacctttttttaagaacactttctaagatgatttcatgataaaactgtcttaaaaattatacccttctaatagtttaaaaatcgtcgtccaaaatatgggtgttcgcgggtcggttcggatcggttttggccaaatttaggacccaacccaatcaaatttgatcggttcgattcggttcaattttcagaaaaaaaagtttgaaacccaactcaacccaacccgttcatgaatagttcggttcggttcggatcaccaggttacccatttaatttaattttataactattattttatatcacgattgtttcaaatatctcatacaattaatacaatattatcaaatgtataaaagtagtaaaattgattcatttaataccatcaacataatattataaaatagacttataatataaattaaaacaaaagatttgtgaacaatatttactataatagtctgaatcataattatttcttacaaaccaagctttgttataaccaattttgttgcaaccatatttgctgaatcaaacaaataaacaaaaatataaatgaagtaacatggaccttgttcatttgaacagcagaagcaataatattgaaataagagataaagaagacacaatcaattttaacgtgaaaaacccaattgggtaaaaaatcacgacttccaaattggataatcaatccaatggataactccactatgataattttgtgtacaagagttcttagtatcctagtttcctaatctacccttacacaacaattatcccatttggtatccttgtttcccatcaaaaagctctagtctcaatttaccaagaatagagatacactgatatccttgtttcccaaccaaattggtatcctagtttcccagccataagttgcatgtctcaattcatcaagaatacagacaaaattggtatcctagttcccaactgcgaccttttttccaaagtcaagaaaaagaatacaataaaatagtacatctacgcttatattccttaagcaaataggtacctttaaatcctgattgagagttgaagaatcaaacttgtcaaacgcttctatatgatctcacaacaattctcttaatgatgcagacataaactctctaatactctaatattatttggaatggaatgcatacatgaacaccaaaatatgtttctatttatactaatttaaagatatgattttaaccaatttttgaatgcaatcctaaatatatcctatcatattatccaatgcaatcttaaagatattctattatattatgcaatgcaatcttaaaaatattttatcctactttttaatgcaatattaaaaaatatcttatcttatttttgaatgtaatcttaaacatttacaatatcatacctttttttattatcaaattatttttaaatttttaatatatacatataaataataaaatttatattattattacgggttcacggatcgggtcatcggatcaacggatctgtaaatctaaacccttgacccaacccgtacatgaacggttttgatcggttcgattcggttttgacccaaatatataaatgacccaacccaaactgttcaaatcggttcggatcagttcggattcacaggtgacccgtacccgtgaacacccctagtccaaaaatattaacttttataacggcgactttaaagataatagtaacatatcaccgttaaaaacttttaaagtcatagtaaaaagtcaatttttaaatgtatacatttgtcaaattgactaagttgatctcaaatttgatttcaggataaattgaataaatgtttggctggtaagtttatacttattcaagatccttcaaagttatttttattaattttataaaattaattgtctaataatcaaatcaaatttggttattcattcttgtttattagctagttgagtaaggtacaagatttgtgataaactttcattatttatattcaattcttatgaaaaaaaattatggtcttaatcgaataaaaaatataatattttgacttatatataatacatattattcttatcaagttcacttgttaacaaatctgatcttctcggttgtctaatattattgatataatctcttatctttttctttggtgtgcaataaaatacctattaaaaggacttcaacaatcaaatcagttaagttgaagatatttatatgttttggataagggaatacgtaatttcctttttgtttcttggatatgtattgagggagagagaagttacttcttcccattaaccatcctttgctgaatgatcctgtttttcattgtggagattgtgcctagacgtgcacgaacatgggacatgtgtctgcatggagaatactagctagtctaattatataccaagctcttgtttaagctatgctgttgagtatacacagagttcatcaccgtactgtacacaaattgttcactaaagctaattaaatgttgctagcttacgagagctatgaagaggatttgactattagttcacgtactatcattttgaatttgaaggaaataaatagagatttgaaatcgaaatacaaatcaaacttacaaatcctcgaaacaaaatccactctcaataaaatataaataaaaaacaagagaataaattatagttatagtacatgtctggatattagttggagaactcaaaaatacttttatttccgaaaagacattttcttcttttcttattttgtgacctgaactgtaaaaatgtgcattagaatcatcaaaatcatgttttcaacttttatccaaatataaccgtaaatttttgtctaacgaatttataaactaggcaaataaatgaaaaattatctattacttgacatttttttaatgcaaggtatcgcatattagagttagcacttaatctcttagggtgtgtttgatataatttatgagaatcataattcttaaaaataagaaaaatatgtttgattgagattcttttttatataatatttatatatatttcttaagagcaaaagattttcacgttaatttttaatagaaatttataaactttaattatttatcacgatataataaaaataatatgatatttttatcacaataattattttttcagcataggaaacttagggtctgtttgtttttattattttttgttttcattttcaatgaaaataaaaaataattgaaaaaatatgtttggttagatgttttcattttcaattttagaaaacaaattcagtattttagaaaattccgaaaacgaaaaaaattcattttctgcattttcactaatcatgcatgacactcatgaaattttttagatcttcttttcatttgcatcatactttctttctcttggaacctagtaacagtcaacaataacatgaccgtgcactcaaaacttgcaatctctcccatctagtgaatgccattggataaattttctaagtaatgagtggaaaacaattattgaagaaaatcagaaaatgaaaatgaaaaccaacaaacatatttttctaaatgatgaaaatttgaaaatgaaaataattttcataaaataaaaaagaaaataaaaaaagaaaatattttctcaaaccaaacatacccttaattttctaactttcccatgaaaataattttatggaaaacctgtgtagaaacatcattggaaaacaatgtttattgaaaatgttattttttaaatagtaaaccaaacacaaaaattaaacatctccaagttcaaattcttagaaatttttaaaaaattcttatagcaaatgtgctcttaaaagtttcatataaatccaatcaatataactcaattaacaacaagaggaggatttatattcaattttcacattatatacatcttggaaataatgaattttaagtgtgactaaatccttcatctaggattagtcctataattgactcaaaaaatcaaaacttgtaaaaatatatcagatccaattgagaaataaaaagttctaattactatattaaaaaatattcatttaagaaattatatctcaaacaaataatattcatacaaatggacttgagattggaatccttatccacttgacatgttaaatacactagtacatacattcagtgttgtgaaattcgatccgatcaggtcggttggacatgttggaccaagatccggtggtctaaccggaccgatttcattattggattgattatgtagttgatctggtcaaactcgatcagttagtttattgatcttggttgaatcggttcgacctgactaattttacaattttttatataaaaattttgattttttaaaaaaaatcgaattttgaaatataaatgaatttttcttactcaaataatgttagttatatatttatataatatatataattttgaatgtttaatatgttcctgatcaaattggatcaattattaatccaccgattaaattactgattcattatttcaagtcaataatcaaatcagatttcacaactatacatcaagtgtgatggacaataaacacgtggctttgcttggcattccattgttgcccttcctttttgttctggtttcggcatttgggttttcaattatttttcagcctcgcgtgtgacttccgaacggaaaaacagcacatgagcccccttacttaggaatatagagaaagaacagagaaagtgagaaaataaaaaataaaaaataatgaaaaagaaacacatgaccaataatgatgagatatatattagggacaacacacaacttaagcacagaaaggcaaacaaatacgcataaccagagagagaaagaaatagaagaaaagaaaagaagcagagtggtaaacaaagagaaacaaaacccagaatctagagagcaataacggctctagctttgtgaatagcataccatagcaacaacaacaacaacacacagaacacacaaagaaaaagtacttcccccaaaaccatatattatattattatatgtacatatagatatacatattcatatttttgtgtatattgagatgagattgttgttctctctttcttctgtttattcatgagagagagagagagagatcttgtcctcctactatggtcgctttgtagcagattaggtgatcttatgcaacaaatttcacttgggctctccttcatcaatcgatgtttcacttttttttcccgtcaacgcttcgaatcagagcttcttttcccccttttgatcgatacccattattgcttaggtttcaaaaagtgtttgattctctttatcctcttcaattttgctgctttatgctctctcttttttgggtgtttaatcaacaaaattttcggaattgggattagggttttcattctttgtgggtattttccgggtatgtgtactcagcttgtttgtgttttttttagggtttcattggatcgtaaccggggggcacttgtccaaattgcaaatttcctgagtgattagggttttgatcggagggtgtgattgaaaggaagactgtgcttgttcattctctgcgtggggttgcgtgaaatgggcatggtctgtggtcttttcaggggttcatattttggatttagagttacggtggttgagcatttgcacttggagattgcttaagatggtgtttaacattgcttctttgaacatggaagaagattgtctatattaataacagtgaatcagtgatcaggatttggataaccgtttctggacacactacaaaaagctgggccttctgggtcttcatttttggtgtttttcttctctgtctttttgtctttgttgggggatcattttggtttagggatttgacacaaagaaaaagctgttgattcttagttggctcacaaggaaactagagtatctgatttcagtggtcctttttagtttctgaagcagccctttgaattgatataattagtctgagcttaacactagtgtaggaaacatatactgattggaattgtgttgaaccatttgccgactttaagtagttagaacaagtggttgctgtgctgtgcgttgattttgcatcagtttttagtagtatagtttgagctgtttgaatattttggtgaagggtagtaaaccttggtggtttccacaatttgtgtttgtagtaagaggcttatggaggaatattaaagctggaaatgaatgcagtgacatggtgcatggacaggagcatagttgctggttcgttccctttctggaacagggctactggaaactaattcaagcactctcaaatttagaagaattttacactaggcgtatttggattttgtgcaatgtcgcgctgttttccatttccaccaccaggatatagaaagaaggctataacagatgaagtggacttattaaaaaaggttaatacacttttcctacactcacattgtacatataatttgacatagatttaactgtgatgcaaaatggagttttttgtgaattgcataacgttaaatgtatattgatagacgtcattttctgaatggaacatataaagtgctgaattcattcatgtttgaattaattttgtactccttaatttttcatctgtttcttcttaataatataaattcaatttgtttgaagttcattgtaaaattcttgcttgaaacattttaatcggcatcttttgaactatcacaagtcatgaaagtatcagatattattctgtatgggtgcaattgaagatgattggaggcttacatatttacattacagtatctgttttggcctacagttattagtaggggttctgcactttgttgatggaagttggttcacttgatttgctggagtttatctgtcttatatgtctataagatgttaggtttcctgtggtgtgtccaaaattttgatttttggactgttatgatatgtactcctgaatatataagtttcaagaggattgagtggagaaataatgtcattactggtgtgatcagtgttatcaatggcagatggtgggaggccataattccgccatataaacacgccattgtgccttatggtctgccatggcgggcgtcccttcacaaattgaatatggcagttggcaaaaaatctgccacgccatttctccatggccgctatttaacaacactgctggtgatgaggaagggatattatgatgattaaaagtgtatatgctctgcttgttctatgcctgttgttggcaatattatttttttacgagtccttttgttgtaaaatgatgaactttgtgcttgatggtatgccttggcaccttaggtattgaagcaaaaagttagtattagtagagattgtccatttatatttgggttttggagattcttctaatattcgttgtaatacttactgattttttttttttggaagcaacatctttgaatatccttgatcttgtcagtcatagaacaaagcatttcacctcatctaaaatggatttagagtaaggttataggaattataatcatttttggggttcaaattgacttaagcaagttgtgggaaattgctagttctatgtctttgttgaaataatagctgtgaagaataaggacagtccagggttaaatatattatgcttgtatactcaatgggaatcagatgcatactcttaagttaattacactggtgaaaattggttctagatattcttggcccaacccaaccaattgattttacacaagtgggactgactcgactgagaagatgaagaccaagaattcacattgatttgattgtaaatagttgggtgtatggttttgtataaataattctgactattttagtttcttgttttggcttttctacctgaacatactttgttgtgattaccaaggaaaatttaagtaaaaccattacaaaataccatgatctaaaaatagccttggcaaaagctgggtttttgacgtagtacaatggcatggtttgattcttgtagcagattccaactattgggaaaaggcttttgtggttgtattcttcttagatgatcttataggaaattttgagggtttgatatatctaaaatatattaactgtttaatctctggtttattggctaccatgacttcttgaatcaaacatgagttttgttcccctttttttgagctcctttatactgtttttattcaaatcttttgttttaagctgtctatctgcacaattcagtagacttctcattctttctgttcaaagaagaaagagaaaaagggaaaaaatattctattactcaacattagtttttttttttttttttttnnnnnnnnnnnnnnnnnnnnnnnnnnnnnnnnnnnnnnnnnnnnnnnnnnnnnnnnnnnnnnnnnnnnnnnnnnnnnnnnnnnnnnnnnnnnnnnnnnnnnnnnnnnnnnnnnnnnnnnnnnnnnnnnnnnnnnnnnnnnnnnnnnnnnnnnnnnnnnnnnnnnnnnnnnnnnnnatactgtttttattcaaatcttttgttttaagctgtctatctgcacaattcagtagacttctaattctttctgttcaaagaagaaagagaaaaaggaaaaaaatattctattactcaatgttagttttttttaattattattattttttttatttttttgccttttttctcctgtgattttaatggattttactcaatcatgaaccatttattgaatggtagcagattttccgctataagttcagtgaaattgtgctagtttattttccccaaacatgtaaaagtgttcaagtttattttgtggtgaaactagaggttgctacaatgtggtgatcaaggtgggagattttgtataatgttcttgtataaattcttctggttacatcaatttatgtgccccttgagttcgtgttatgtttaccttgattagattaataagttatatattttcagggccaactatgatttgctaatgaaataatcatataataagttatggatggcaatcaactacttcaggttgattttatattagaaagaaatgaactaattaatgttttgtcaagtatatgcattaaattctcaatttgactagcaatgatgctagtcaactctttcccttgtatcattcttcttgttaggtgacattcaaaattgttagtgtagcttttctttttggttgatatggtgtatgtttttaccatgtcataacattattgattatcctgtcttgtcaattcaggatcatagttttttatagtgagctagctacagtgctctcaagatacttcttctctactattgtattgcaagttttatgaagtggtactatataaaaagacaatgggtaccctaaaatttctgattgtgtattgatgtgatccccccttctcccttctccccttgtccccttttttatttttttgtctgtgatgcttctctgtgttcagcagcgacctctgggcctcttcatgggtagtgactgtctctttggtccatgctttttctcctgttcccccataatgcctctcttttccttgctggactggacttccaccaacccattgatatttgactatctagagagactggctagtggccatatctctttttctgataattttttatttgtttctttctattagaccatttctttgtttcaacttttaattggattccgttaccagtagcatctcttatagatagctgagctttcctataagatggaatttggaatttgaaaattttgaggagaaagagaaaataataaagcaacatctgttatgttggataaggatgtttgagtatagaggttgaagttatgtagatcagctagatttattgcattggatgattcattaaagggagtacattatgcagtagatttacttttgtggagcaggctgttagcttatatttttagttgatgggagttttaagtatgattaagcctttaaggtgttgcgtgataggaactaacttgaactacataatatgaattgcatgataataattactgcatgactaaggtattgcatgataataattactttagcattttggtttgataattggtcctctatttttctaatttttgtaatttcttcattttgttattgaaacctcaaccaaccaccattgtaaataggaagtttgtgaaaaaaaagtgaggaaaatccagggaagataatgtgggcagttttcaagttggtatgtgtacattgcagggacatttgtatgcattttgaaatagaatggattatggaggttaaagtgtttcactttttacaaatattttccttatcgttctaatatttggagaattgcaagtttctcctcatttacaaagaccaaacctgctatgctttgttcccattttgttcagatcctgtttcaatatcgatttaatgcttatataaaaatttttggtgataaaattgattgtttaatggatacaaaaagtggatttaatgaagttttaaacattttgcatgtgggagatcatgactgcatttagttgcaacccattccttatttaaatgattacatttcaatagttttatttagtctttcctattactttttctaaagtctctccttttactaagcattataattatttttgaatgcatggcttgtcccaagccaggataaaggaagagagttggtatcaggtgttgcgaatcgaccataaaaaaaatatctatttttatgagatgacccataatgatattttgttggagtgtacccttcatagtgacgcgttacatcggatcccgggtgtagcgaaaaatgtgctagagcccttgccgcaaggcaaggcgctgcatcggtcccgggatgcagtgataagtgagctagggtccttgtctcaaggcaaggcgtcaagtcttcaacccggatttggtgataagttggtcagggtcccaacatgcagatgggcgagggtggtaggtgaataccgcccaagggttatggatgcaattgggaagctgaaatataggaaccttaatgggtaaactgaaagagttagctgatgtttttgccagaaggaaagtgaatattgtttgcttgcaagaaattaagtgggttggagaaaaggccaagaaagtggatgacaccagtttcaagttgtggtacacaggtataaacaagagtcgaaatggtattgaaattatgatcgatagaagtttcagagataaagtcgttgacgtcaaaaggaaaggcaacaagattattctgattaagcttgtagtgggtgatttaattttaaatatcctcagtgtgtatgcaacccaaattggactgcaatcaaatgataagaactaattttgggaagacttgacggaggttttgagagggataccatgagaggagaaaattttcctaggagaagacctaaatggtcatgttggtaaaagaagtggaggttttgactatgggacaagaagtgagactgaagaagatatcttgaacgttgcactagcctacaatttgatgcttgcgacaccttccaaaaaaaggagtctcattttatcacctatcatagtaaccaaaattgtagccaaattgatttctttatggttagacgataagatagaaattcttgtatcgactacaaggtctacactgtagactgtgccgctaggcaacataagctgatagttctagaggttcggttcaataaagtacttaatatgaggaagatggttcaaaccccaaagataagatggtggaagctaaaggaggaaaaacaaatagagttcaagaaaaacatgttgtgtgaaggactgtaggagcctatggggggagcaaatgaaatatgaaataagatggttaaatgtatccaaaatgtgggaaggaaggtgacgggagaagcaaaggaaacaaatttcttacaaaggaaacatggtggtggaatggagaggtgcaggagacaattaaacagaaaaaggaatgctttagatctttgcataaaagttccaatgatgagaacttgcaaaggtttagattagcgaggaaaaatgcaaagaaagcagtgtgggaagttagaggcaaggtttttgccgatttgtataaaaatcttgggagcaagaatggtgaaaaagttatatacaaacttgcaaaaatgagggataagaagagtaaagacctcacaaattagatgcattaaggatgaaaatcaaaattttttggtaacagatgaagatgtaaatggaatatggatgaactattttaacaaactttttaatgtggatgacaataaaagtgaggtggatttggatgacgcttatgatgatctgaatagaagatttgtgcataaaattaatacatatgaagttaacaagactttaaagagaatgaaaaataataaagctttgagatctgatgacgtcctgaagtgtggagaggcctgggggatgtggcaataaaatggctaaccaatctatttaataagttcttcaaacaaataagattctatctgatgcttggaggaaaattatgcttgtgtctatttataaaaataaggaagattattcataattgttctaattataaagacattaagtttatgagtcatatatgaagttgtgggagagagttattgaacatcacttgaggagagagaccaaggtttttgtaaattaattttgatttatgtcaggaagatgtaccataaaagttattttcttgatgcaacaattaatggaaagatatcgagaaaagaagaaagacttacatatagtgtttatagatcttgagaaagcatatggtagagtctcaataaaagttttatgtgggctcgagaagaaaaaagtactgttaaaatatgtaaatgcaattaaggatatatatgatggggctatcatgtgtgtgaaagcttgtactgaaatttaaagttattttcttatcacggtaggtgtacaccaaggttcgacttttagtccttatctctttttcttagtgatgaatgaactaacaaaatatattcaagagaaagtgtcgtggtgtatgctttttgcagatgatattgtgcttactgatgagatctaagatggtgttaatagaaaacttgaattgtggagaaacactttagagtctaaaggactcacgttaagctggaccaagactgagtatatgaaatgtgagttttcactggtaagagatgatgatcaagatccctgcatctacttggtcaagaggtatccaagaaagatgtttttagatacttgagatcaattttgcacaaaggtggagagattgatgaggatgtaaatcataaaattagagcatggtagatgaaatggcggagtgcatctgagttattgtgtaaaatttcctttatgctaaaaggaaaattctatagaacaactatatgactgacaatgttatatagaactgaatgttggccagcatataggcaacatgaacataaaataaggatagcagaaatgaggatattaaggtgaatgtgtggttatacgaagatggataagataagaaatgaagatattcgacgaaaggtaacagtagtattggtgagtgaaaagatgaatgaacatagattgagacacataatgagacgcccttggatgctcctgtaagaacagaagtttgttaccaagagctcgacgcaaagagaggtagaggtagattgtaacttatctagaaaaaggtagttaaacaagatttaatgaaatgtgatatagattggcgaacggtgtgtcttaggaaaaatggagaaaagttataagcttggtggagggttagatccgttgttatctctatgttctagattatccctttttagtcctttgttcttcatctcccctttccttcttttccccttctttacttttaccgtctttgttttttcaaccttctcgtatttattattgggttcatctaccatcgatcccaattaatttggattaaaggtgcttttgatgttgatgttgattagcagtttgttgctaatattaagttcatcaaatccaccatgtaggggttggcctctagagcatattcttgaatcatgtcaatgtttttaaaatcaaattggaggttgagctactgagacctggtgtagattaataagcctagagtactctgtgtagagtgatgagccggggtttaactcctttaaagtgaggtgtaaaatgagaaagttaatgtgtatccactcttgatttgaattatccatttcaaatcaagggtggacagactcttgctttctctctttagaggagtcatcagagtacttctaagtccttactagaatttcatatgttctagtgacaggaagtgtctatattacaatgatgcataaggtcaaaataacgttaagtcaactaaagggcacttataaccaaagataataaaaatcttagatgaattataatttctaagaaaataaactttaattaagtataaaatcttattaataaggttttgaaagtgtttgaattacagacatagttggttcatggtcagatcagttcaagtgatcaatcccgtctgtttattcaaacatttcatgacactgcattgtaatgggtgttcaaaaactaaatggggataatttcacacaagaggaagatcctagagtctcatctgttttgctttggatgctcctctacaaggagtatcctaatggagctcagtatagttatgactttggtcctgtttggtatactattgtattgactatgatgtattggattacttcttgttaattagaagatcaaaagcagtggctttgttgtttgttctttgccttcattttttttcaggaataaaatgatcaaggtttgttctattttgcattcattttgattcaactacaggaacatagaagggtattttccttggtatcattgaagtttcctggttgttcatctatgggttataactggacatgcatattttattttgtggagtttcttgtttctagtccttaataaaacatgtcagttgcacttttttgatctttttatttcaatgtgaggcgtagaatacagaacttccgttaaaagtgtcgtagcatatcttatttgtaatatgtgccaaaagccataaaagaaagaaaatagggatctgaatggccggcagtataagaatgaaattgtttctgttgggtttaaagaatctaatcattgggaatgtttaataaggcatcaaattgaattgctatacttttatttttgacttttatggatttgtcttttccctcttagtatggttatagttggctgaaatgtgctctcctagaatctagaatactttgtcggtagacaatgtgtattgatggactttgatcctgttgttattgttgcggcttcttccttggatatatatgattgccaaggagacaggagccttttttttcttttttgcatgttttactattgatattctttttttctctttggttgctcctgggtgaagagattttgaagccattttggtttattccttatttgattattattcttaaaatctcttctcaccatatgacttgcaggaaaagcagaaagaaaaaaaacataagaaagataagaaggacaaagagaagagggagagcaaggaaaagagagagaaagaaggaagagatggaaagcataaggaaaagaaggacaaaaaggaaaaacacagagagaaaaagaaagataaggataaagacaaggacaagagcaaagatagagataaaagtaaaagcagttctgctgatgacaaagggttcccaagacaagctgagggtctcaacggaggtaaaccccatcaaaaggaaattaagcaagatgataagaagggtatcttgtttgagaacagtctcaccaaccagtatgctggtaacaatggggagaaggcaagagagaaaaatcatctggctgaagagagcaaggattcaaagttcctcctggagttggaccggaggattagggatgatgatggaggagctgacaatcaatgggttcataaatttaccaatacaaaccatagaaaagatgaggggactgttaggttggtggctaaaggtccaggtggcacaaggtctgatggtaatgaaaaactcaaggatatgggtcttcatgttaagaagattgatgggcgaggaatacaggatgaggtccggccaattggaaatgcaccaccagttcagaatcatgttggaaattttcatcctggagttggtggaatacccaaacttttgggaaagtattttgaaaggaatatggaagcaactgttgaaggtaaagaaaaggttaaggaaaagaaagatgaaaaagaaaaggccaaggaaaagacagaagaaaggaaggttaaggaaaagaaagatgaaggaaagaaaaaggttaaagaaaaaaaagatgataaacgaagagataaaaggaaagatagagagaaggagaagaaagggcatgggaaggacaaagacagggacaaagagaagaaaaaggaggagaaagctaaggagcatagtgaacttaaaacaacagagcaaaataaattaaaagaaagcaacaaagttggacttataaattcaaattctttcacacagccttttaggaacagccatgggaacgctgtcagtggagaaaatctcaagaagcggaaggacattgagtcaaatggagttccacatggtgagtgttacttatgatgagtcttgttctcatttctactcaatgatcctgttaagttgtatttaaaaaagaataagatgtttctcttactggatttggactagtatattgctgacctaataagctaataccagatactacgtcctgtgagataacggtgggttttccctgatgtcacatgcttatattgatatttcaattattggtatttttcagtcatattgacaagttttctcaagtttgtacgcatttttttgctgttgaatagacaggttataattttttttttttaattttgttacagtcaatgacagtttgcccaaaaagtttccgaaatcgtcttcctctcatccactcactgaaaacggaagggtattggaaccttgccaagtttccattccaaatgcttcagataggccacgagaagccaccagtgttaaggtagtaaagaaagaaagcaagatgaatggcatcattgaaagtcagccatttgcagcttcttcaaacaagactcacactgccaatgtgccagctgatttggtaactgaagcaactgcaaagccaccacatccagataccaagtacctaggccaggtatattcagtacctaaggtggagcagtggtctgattttgacgatcaagcgtggctatttggcagcaatgtttcgcaagaaagaaaatctgtggtgaaatcttcagaggttggggagacacctcaggtatgggcagaagctctgcacatagagccagcagatgtttttgctcttccatatgtcattccgtactgattgattatttaattgtcacacgatgctcttcaaacaattatgatgtgtgcacaaggaaccctcctttgacactccgtgtgggaggaactgaagcatggaccggaaaatgtttccaaatttcttgatgcattcttttgttgcttgcacactggcagcaaataatgagtgactcattggttgccttgatcttaaactgtttggatggtgactcgtgctgcaactgattgtcttgattttttactgattggaaagggaacatctgtcacaagttgcatgcttggtactgccagattgggggtgcagctctcaccttgtgcatcatagtaattcatttagacaacagagaatttgtacaggttgtggagagggggaggggagaggtacaagattttgcaacttgtttttctttttttgctgagagctgagctgctctttttaattgagaatgagaatttgcaagtgaatgtggtctttgcaactccaccacaattttgatttgtaacatagaactctgattttacgagaatatgtatgatagagaaggggaaaaagaagtaatcggattcatttattcagtttcctgtaaattttattggtcattgaatcattttgctttagtgttaatgattattgaatggaattatatcgtaggggataatataacaagatggttttaaattgagtaggaggggtatggatggtttgaatctttttaatagatggtggggttcactcgtgtaaatcaaagatgtgaaaggtgactttcgttttgtaaatttgctttgaatatttttctttttaaaccacttgcaaaatatcgtctcaaatgactttaacagcttttcttattaaccatatttcattaaggagaagacaagtcaatgctatcccagtgtcgtccaagggatattgcaactaagtggtaccgtttatggtctttctgggttgttgcattagatttccaacattttttttacggtggggccgtgggggtggaggttcataactgtgggtcagttacaaagtccatctatgcattaaattatcgaacatgtcatagttaaggaggaatctaaccttgtgattgcatgccaattttgatgctaggattcagcatcaaaaagaagttataagttattgactaccgagtctttttcaatgttcagctaagtttctatcacaccagagaaatcaaaataacaccaccacctgagcccaaaatatctatgcaaaacgttgagaacaattgactaatcctaaaatatacttaacggatgtttcattttatttatatttattttttgtatgtaacactttagctgaaagcaatatcgccttgctttgtgagacacaaacctggtagagagggtatggttccatatcctaagttaattatgctacattatttatttatttattttttaaaaatctaagctttcaacaaaattaaaatagtggagcctacaacaattatacagagggacctgctacgtacgtacacactcagaattttgaacctaaatattatataagtgtagataacatagtaaaccccaatttgatttgaatcaatttttatgcaaaaagttgctgataatgtttttttatctaattaaattataaaagtgaattacggtttaatttgaataaatgatttggtttttatatttttatttctaaaacattcagttaatatttaataagtttacaagtacattgtaatcattataacattgataccgtaataagacattcaagtcagcaaaaaataaaacgataatggagataatgaaattataaagaaaataaataaattgataatggaattttataaaattttatttatacaactaaggtcctagttagttttataaatgaaactctttatgtttggttgtgggaattttttttgtcttaaccttttgattcattataaaaatgaactttaattaatttaaaatttggtaggaagataactaaaatctaatcaaaatttatttttgtcaatgattaaacttacatattacccaaataattcaatcttaatttcagtacattaatcatttaagtccaatcatttggttgattgtgtggtttaacattgcttttaaaaaaaactctatggtattatagtaacttatcattagtaagtcccatgtttaggtaagagagaaaggtggtgtactggtgttacaccttcaagtcttccacaaacaaggtaaagtttattgatatatcaaactatgtataagtacggtttgatttggttttaattgtttttcaaaattggattcaaaattcagcctaactaatgaaaactttacttttttagtcaacttgtttaattttttgtaatctgttatgatttaggattttcttcatctcaaaaaancctgttatctaggatagtgaaattgttgtttaagatctgtttccgtatttttagttgtagatgtttcttatcttccgtttatttcttttttatattctgacattatctctgcacaaatttcgcagttccctccaattgttaaacattaatttttgtatcagtatcaaccaccaattgtgttttttaatccttccaataaaggaccggttttcaaaactatggtatcagcctctaaatgtgtttttttttttcttccaacaacagatcggtcttcaaaactatggtatcagcctccaattatatatttttttttctcccaacaattgttaaacatacctctttcccattttctgttagtaattttacataaatatcatttcccccttttcttactcttttaacccattcaaatattctacacttctgcttctttctttcagttctttacctttcatattctttgacaatgcctttgtttttctttcctcttctctgacgacttttgcaataaaaaattacaaatgtattccttttataatgttttgtatatgtgtctaatcccaaaataataaggacaaattcatagttgaaacaacagtatcgaacaaaaaaaaatatggccttaccacaaacaccaaaggataatctctggcagccactttaataatttaatttctaaacttagtagaaacgaacatgattcaaacagaacatgaaatatctttctatataatataacctttcatattaagaatatgagctttcaatgtgttcttttacagctaaggggtagtttgtgctaaccgaataaatagcattgttggaagaggatgactcaagcgatcgaaggcatagagaaagaaaataaagtaatagccagaaaatggactaggaatgaagaggtagtatttgtaaggagaagccaaaggaagaaagaaggtgagatatatttgaaaagagggagaaaagtagaaaaaaaatgtatataagcaaagttattaaaaaaaaaaaaggaggagggatacatttagcaacaataagatggatacatttaacaattactttacttttccaatggctatctgagttttttctttctttcttcatcatcatgggaatcctcatttcttgacctgatgctttctagagataaaacattgaacaacatgtttatgactaaaacttcctatactcattattgtttccagctgtgtcccattgcattttgtaaagctcaatctgaaatgaaccaacatcccatgtttatcatattagttttgggctttggcccagtatagctatgttcagcttccgtcgttgttttcgttgattaaggagggccaagcctagaactaaaaacccgaggaaagattacaaagctaatgaactgaataaaaaaaaatcattcttttgtcaaccgagaatctttatgacgaaaaagacatgaacattaatttttttttctcagccgacatgaactttatgataaattatctagtcattatatcttacccaaaaaaagttttagtatttatatgaaaatgtttttttcgtaaatatttttttagtaatttgtcaccgtcagaaagtttttataacaattttatatcactttaaaattaaagtattctccaatgttaacgacaggaaacatagaagcaaaactaaaattttatgcatttgtaggaactaaaaaatcacaatttttttttatgagaacaaacttaaaatgataacagttcagtgatcaagtgaatagtttacgcttatggccaaaactatgatagaaggagaaaatttaattaggaggctaaaaagaaagttatttcatggataaaatttaaaacaattatacatagtaatattttaaaaaaataattaaggacatggtttggtcccttacaagtaacaatgaatgacgtcccattccatggttagaagatagtacatgggcacctccaatgctagaagcttatatggatttcttattgagttttggtgaaactctcttgaaatactgcattggagatggtcttatatatctatcatggttatgttgtcagatacaacatgccacttggctagaaagtctgatgcagaacacaaaagtggtgatgaagtcttcagtgttcattattcagtctgaaatgatggtatatataaaatccgataaaagaaaagtttatttaaatttagtttttatacactatttatatttactagttaattaaaaattactttcaaattaatttttaaaatgactattacaaagttaactatcttacaatacataagatttcattgttaaataatggtataaaatatttgttttatttatatgtatgctaatatgtattaatctttcacagtgcatataaattttttgactagttagtgtttggtagtattttttaacacagtttttaaacacattattttaattttttaaaatttattgaaaattataaaatttgttaacaaatcttaataaaaattatttttattcttnnnnnnnnnnnnnnnnnnnnnnnnnnnnnnnnnnnnnnnnnnnnnnnnnnnnnnnnnnnnnnnnnnnnnnnnnnnnnnnnnnnnnnnnnnnnnnnnnnnnnnnnnnnnnnnnnnnnnnnnnnnctttcaaattaatttttaaaatgactattacaaagttaactatcttacaatacataagatttaattgttaaataatggtataaaatatttgttttatttatatgtatgcttatataacctttcacagtgtatataaattttttgactagttagtgtttggtagtattttttaacacacgtttttaaacacattatttttaatttattagaacttattgaaaattataaaatttgttaacaaatcttaataaaaattatttttattcttaaagcaataaaattttctttcttatacattagaatttaaaaatgctcatccatatcatatgtaattttttttttttttgaatgtatatagttttaattacggactcaaactttcagcaaattaagttggtcactaagatataaaataatagatacataattgataatgtatttaatagagagtatattggatcttgccttgcatattatttattcatatcttttattaacggaatttagtttagttaatttaataaagtgcgtaaattattataaactttttagaatttgattttaatttcaacggaaaaaaatcataaaaaattatgagggatgaaaccttttgtctgtttttttgtttaaaaaaaagaccaagaataaaatcagtaaaacacaatctaaaggatagtttacacagtagaatcttgaatataaatagtactaatgtagttgtcatgtgaagtagaaccaatgctataaattctgctagtaatcttgaatatatatagttagacaagtgacagcgcagctgcatgcatgcaccaccaaagcacatgttcaaagttaaaacaaccttcccgtctcgccctattaattataccctcagacctaatagtctaagagcatctttagtggtagatttcaaattggaatcttagatcactttttggtagatcccatagtgtcatgtaggattgaagatctctcaagatccctcctattttattttttaatggtagatcttattttgagttcttagggagagagaaagaggaaaaaaatttatttttttttgaacaatgtgcagatcttaagggttcttctacaagaactcattctccatgttggagatttctctacctcctttattgggagatctagtaaagaccagatcttgagctcaagatccttactcaagatcttgcactaaagttgctctaatacgcttcttgtgtaacttttttttatcaatgaatatataaataataaaaatctcttattttttatattaaatataaacaaatttcaattcttatgttttatttaatgagactcttttaatatttgtagtggttagtggttacctatgcaatcacacgttaaattgtttgagtgatttttgtcctgtaacttattaatgaaaaaataatgaacattatgattattggacagggtcaaacgactcaaatcaaacaaaatacaaaatactgaaattttaagaaaaaataaataaactaatgtctctctctctatgaatgactcgaattgataagaaggagaagaaaaaaaaagtataaatgaattgacatcataattattgaaggatcaaatcaagagaatttttatggtgcctcaagaattgtgagggttttggtattgttatttttttaaccaacgaaattatcatgtcatacatcttctcattaattaaagatttttttgtttttttcaaattagtttttaaaatcaaaattaaaactattttaaattttaaaaatttgattaaacataagtttaaaatatgaatcctaatctctttcaccaatattaatacagaatcacaattttatttttcttgaggtaatagttactctaatttatatttaatcaaatttttaattaaaataattgtaattttatattttaaataatcaagaactaatttgaaaaaaataaaaaattatttaattaataagacgacaaataacataataattttatcggttaaaaaaacaaacagtgtcaaaactctcataattttttgggaaccgtagaaactctctcaaattaaacaaaagccgaaatattgaaactaaaaaagattgaagccatgtgtctctcactatgaatgacgcaccatgcatgcatgaaaaggagaaggaaaaaaaaagtagaaaatgatttgtgtgagttttacaatttaaagaaaaatcaaataggtaaaaattaaagacatataatttttattgaagaaagtaagggggtgaaaaagactatggaaaattattttactttgataaataatttttttaatctattatataagaatagttgcagtatattataagtatttaatttaataataaatatcaatttttcattggagaaagcaaatgaaccaacatggtgagttgggaccattcagatttgagggtcgatctccatatatgacaacagaattgggataagtgtgtgatttcagataaatttcttctgacagtagaatacacggcttgtttagattacaccaaaaaagtgatatatatcaccattctagttaattatagattacagagaaactcctagctagaaagcttctgtcttattgaacatgcactatattataaaatataaatagaagagagtatcaggggtaccccacccatattacaccactgtgtgtattttgcctgctgttgagctgttccactactcccctatttataatgtctcctttgctgctatttatagtttatttaccccaacacgtggatcatttatttatagccttctagtgggtcatttatgtatcactcttaagtcttaactacatttttatgctaaagagtaagaaactctccttactctttttttattatagaaattctccttaattactttcaatagtacaaagttaagaatcccttatttatttagtataaggtatgttcggataactttttccaaaaaatacttttagaagaaaaataaaataaaataagttttcataaattaaaaatcacgttttagaaaaactcatgttttttttacaaattagttcgtgcataagttaattttagtttatgtaaaatatattacttttatttttttaaagtgtttttagagaagtaaatgaatatatccaaaattctaaatagacgtattttcttcttcgtttatatcccagaagttggttttggaaggctatttggttatttcctaatcatgtggtttggtgtatgaatgatgaagctgcaaacgtgtagccattagttaatagaagagttagctaagctatcataattaattatgacttagacatttatatataataactagctaagacacatatctaaccctgccggtactcttcctgtataatattctttgtttgctgataaataaaaaaataaaaaatctgaccctcctctagcggcttggaaaacgtttgtggggattctataacaaggttagcaaaacctggtttgctgagttaggttcatgtcattctccctgttagttgtagaagaatatttgtattatagaaaatgacttaaatgaatttttaatctttgaaaatatgtcattattttaaaatcttactgaattttttaatcttttttaggttttatatttaacaaaaaaagcgcattttcaccttgcaacatttgacacggaaaactttttttttatctcatgatcttggtttcatataatattaatattaaagaatatattaacttaattataggcctggaaactgacttagggaataatccgataactttactgggacactagctgaaattgaatatcattttcataagaagaagacggttctaaaatattactaataaaaaaagtaattgaagaaattaaatctgttctatattttccttttaagaatttaaataaacactaaaagggaaataaaaactaaaattaaaatattaggatctaatttcacttgattttgaattcggattcataaattaaacaactttttccttgcccttatccttgtttttcatatcccaatttcttattgatggtgaaattcccaaaattagttacaaccaaaatttatttggggaaaatttacctgaactttattaattaacaagcttatttctttaagtcaaattaacaaaatgagattgattatgaagttctatgaaatttaagcaaaggctaaataacaaagttatttatttctatacataacttcattcgtggcagcaaatgcaactatgcaagaagcgcgtagttatatatctcattattcttaacataaatgagtcaaaacatttaataaatggtgataaacattcataagtataaagcaattgatgctcaaatcagggaaatgcatgtttatagaaaaaactttaatcaaggttaaaacatttttaacatgaaaaacttgagttcaggagctttcatcataatattaattggcgaattgaagatctgattacaaagaagtggggatgatctatatgtcttttcttaaaaccaaaagcttttgctcctttgatgaattagtaacaacgaattcgtagaatggggaatcaagaaaaggatagggagggtaatgacctttccataatgggtagacccacccttgaattgaaccggtcagaagctctcaattgggagtttaactaggttcaggggaaagatgattgaggggaccaagagacttctctattctatggtggaaggtttattttgtatactgacaaattggattgagaggcgatgcttacttattcctactaaatgttgaagctaagaggataaagctaagagaattaactcatgggataaagtatgcccactacttatattgaagagaaattctgaatgtcatgtcaccgagagtaattaatccacgcccatgcttaatttcactgctatattctggcattatttttgtaagctaatttgtttgattaaaaagtgctggggaatgaagcaaaaagaatgctcagccaagcaccctatgagtgtacaaaattcattattgtgtgcattgaatcatgcttatcttacctaaacaacctaataaatatattgaaaatctaactataatgataaaacatactaataaaaactaaaaaataagaattaaaaaaaaaaacaccacaagcacaatataattaaataacaaaagtttagataaaactaattacaaaacttgaaaaagcatctttaaacctatttattacacgtaagatgaccaaaccttttaacttttttttggataagccaaattaaaatcaaagtcattgtaactgagcattcaaaacttttaacttgacagagacttcgatctatggacaaaaactaataagcatgtcctgcacaaagttattagttttaccttgagctcaatggacaaaatgaattgtctaggtgtcagctataaaccaataaaactacatcgaatttaagactttgatggcatattaacttagcaacccggatttagttatcaacatcaacatgaaatgtatgtaggactattatcttcacttcaactactttctctgacattatatattcatttctatcaataggcagttgacacctgtttaaattcgatgaaggttgatgaacatgaaagtgatcgatgcatgtgagatgagttggatacttgcatgttgcatcagtaacacgaacggcaaaaaggttggggaatggggacaatggaaataccttttcggctgatttagagccttgatattttattttgatccgaagatatttatttgcaagaatgggggagttgaaattcttgaattagcaaggttagatcccgaaattttgataaaatggagtattgacagcttgtaaatgcaaatatatatatatatatatatatatttttgttgacaaatactaacatggcttgttcaaaaataaaacaactaattaaatctcgagttttaggcttccagacagaaattttgtaattattattaacattttaaaagtaaaaaatatctaatatgttggttaaaaggtttcaaaattgaaaaaaaatatttgaattgttataaatctctcaaaacttcttccattcctatatataaacaaaaaaaagttccagatatcattttttaaaggaaaaaagatcgttctcaatttttatttttggtctcactttttattagatcaatcatatattagttgatagtttgctaatttttattcattaataaactcaaatccattacctccattctttattctttattcaattactaaatcaatcttataactcaatagatacaatatctataagaagtggtactttcatttttcattatatgcattatatcgtgtttattaattagttgcatcttttactttcctatatgtaaattttcacgtgtactttatttattccaattaattatcatatgttcattatagtnnnnnnnnnnnnnnnnnnnnnnnnnnnnnnnnnnnnnnnnnnnnnnnnnnnnnnnnnnnnnnnnnnnnnnnnnnnnnnnnnnnnnnnnnnnnnnnnnnnnnnnnnnnnnnnnnnnnnnnnnnnnnnnnnnnnnnnnnnnnnnnnnnnnnnnnnnnnnnnnnnnnnnnnnnnnnnnnnnnnnnnnnnnnnnnnnnnnnnnnnnnnnnnnnnnnnnnnnnnnnnnnnnnnnnnnnnnnnnnnnnnnnnnnnnnnnnnnnnnnnnnnnnnnnnnnnnnnnnnnnnnnnnnnnnnnnnnnnnnnnnnnnnnnnnnnnnnnnnnnnnnnnnnnnnnnnnnnnnnnnnnnnnnnnnnnnnnnnnnnnnnnnnnnnnnatatacatgaaaagaaaaagagtaaaattaaaaaatattgacaaaagaaaataaattaataaatagaaggttgagtaaatgtatgctttttttttggtacaatgcttaatttcttttagtagtagatcgattttggttttaattttacacataaaactgataataaatattttttaaatatatttattaaataattatcaatgagaaattagatacttaaataaaagtataaaagttgaaccttcttttaatgtctttctggattcgttccggtgatatatggtacaaactacaaaggttggatatatcactttattttcacaaattaagcgtgtgcttgcaattaaattatacttatcgagtattaattacataaatttaaactcaaattaaattgaaatgatttgtaaaaagtgagggaaggcgcaggaaaggtcagtgttggtccaacatagattactagcttgcatgtttcattaataacataaagtttatagtttagcttaattataatttttattactaattttttagtttttaatttttttaattcgacacattttatcatcaatttataaaaaagttcaaaatttattcccaatcattaaattcgccaataannnnnnnnnnnnnnnnnnnnnnnnnnnnnnnnnnnnnnnnnnnnnnnnnnnnnnnnnnnnnnnnnnnnnnnnnnnnnnnnnnnnnnnttgttccaacaacctagatcattcccctaaaaaaacaacttagatatactttctttaaaaacaaaaaaactattttacaattgtttcattttttatacattaaattttaaaagttttattttgattttttatattttcaaaatgtatgattttgatactttttgtcaatttttctttagaaatattagagttatcttaacttttaaattttaaaataatttaatgttattttttatttattatatttcacatttgtttctcttttgtatattatgttttaaaaattttattataatattttatatttttaaaatgtatcattttttattcttttttcaattttttattagaaacttaatgtctatgagtattttaaattttagaatagttaaattaatataataacgactaaaaatcattattatttttttatttaaaaaattaaaaatcattaaataaattagaaaaatatagatatgaaactacggacaacaactatcacttttatattattattattattttattcatttaatttaatcatttaataacaataataatttcatttatcaattattttcaaaaatataacatttaatttgattattttaaaattttaaaaattaatagaacactaacatttctattaacattgaaaaaagaatcaaaacgatacgtttaaaaatataaaagatcaaaataaaacttttaaaatttaatatattaaaataaaataattataaaatataatgaatcaaaataaagaatacgcgtaattaatagtacctataaatgagtggagtggattgagataataaataacttgcattgtgattttttagatgaaacgtaagatcgaatgtcaaaaattagtaaatgattaaaaaaaaattatatgtattaatggaattcgttggccctccacatcgaagtacatcttgtgagcaaaataatggacattaattaattgtagttggcctcgccatgctttgggttgggcatgcatggtattgtgcattccgaaagcatgctcccccattctgaaagcatgttccccgttattcagccatactaattttgacactcaaacatgaaaactcactttaatcaagattgaggttggagttgagtttttttcttcaatttcttaaagtggatacaaccctctactcttccctccatatatttaaaatataataattatttaatagttaaataataaaataacaataataatttaataaaaaggtaaatttatatatttatttaaaatgtaatttaattgttaattttttttaaaaaaatagttattatttattgattatatatattatttgagttaaaatgtaattagtattttttatatatatattttttttaaaaaatatgtaagataggctatcattagatttcttgaatctgatgagaatgaaaactattcatgcgacaacacttgtttagtgtaagaaataagaacaataaatatggaccatatcatatgaatggtcaagattataagtagttgtccgattcccaagtaacaaagtcacgtacattttctttaaaccttgataatataaatatgatttagtagtctatatatacattactcgaatttaaagtgcgagtacacacctatcttacaggacaattcaatatgatatatgggcctaaaacagttttaaaaaaaaaacattattttaaataaaagttatatatcaggtttaaaatatacgaactgtatttgctttagttttcgatcaagtctgatgtcttatataaatgattaagcttaaataacataaattatgcacaattttaaaaaagttacataactcttttgagtaataatgagattttaaattttatccattcaaatatgattatatgaattagatgatttattttttcattcttacatggaaactcataatcacaatgtacatttgaaacattggtagtgtgataatttaaaaaaaaaatcattaggagtaaccaactaactggnaccaagctaataatataatttgggtagtaaataaaataatttaaaatttataatattgatttttaaaaaatcacagtttgagtgtttatatacttattccttctgaatttttgtaaatacttcctactaacatccaaaccgtacatagtctgagtcaagaagttgttgatatgagttatatattgattatcagaaaaatcgataaatattttatattaataatatggtatatatatatatatatatatatatatatataagttttagccggttcaaacgttattgaaagttgaaacacctaattcatagaaattattgaagttattttcttatttaggattataaatatcctttacgacagactataaatacgcagctgcaaagcgtaacaaaccaatgtggatgacatcgatctattttcctctataaatcggtgagatgtcaccactcaccagactataatattaattgccatgtgaatgtggggaacaatgtaaaattgatcgcattattagtaaatgagtccgggtataaaagggaaagcaagaatcgtaaaagaaattatatgagaatgtatttaacaatcaaagaaaacatgattttacgtattttattaaaaagcttccttcttttattttttttaatcagtgttcttaatgtttgtctaaaaaataatttattcattttttttatctatcttttaaggtttctatataaacacaaaatgtaataattttttttattcaaatgacattcgtgtggacttttctattatatcctcttcatttccattctataaataaatgcataagtgtaaaataattaaaaattaagtgaaaaataagagtataattgataaaataataattaacattatcttttttaaaaaaaataacagttagatagtaaccaatttttgtaaaagaactcaacaattaaaaagaaatagaagaatatccttaaaaaaatagaggaagtatacggaaaatgataacgaaaagtggaaagtttttaatcagaaatggaatattactacttctgaatcataataaatgttctgtaagagaaaaaaatcaaaataaatattgtggaagaatatattctttcaggatttctagtacaaatttaatatatatcttatttattaatttctttagcaagtatctttaagatatttactactctctctgtcctaaaataataatcattctagcttannnnnnnnnnaaataaataagagaataataattttataaaattaaatttatattatcaatataatttatttataaattttgttattcattaatattacaaaaaatataagtaaaaaaggtaattaatattacataaaaaaattaatatgacattattttgaatttttttcttacacaacaataataatgggatggagaaagtaataatattttacttcattcgtctttataatataagacacttataactaatttaaatatatatttaaaaagttagttaatttaagtgctaacattaaatttgtttgtaaatgtaattttatctaaaattactcttaaaaatatttggactaattatgttacttttttcagttaattactttttatctaaataattaatatatggagagaataataacagtgagtttcagtttttaaacctaatttcttcaactcttcaatcctcgcaagaaaaagaaaaaaagatgatttatagcatttattatttatggactaaaatagttaacagtattttaataaaaataattaatatgaagaaaatttaaaaaaaaaatagttttgtaaatgatcaataatgtttcaaaaaataatatttatatttggcatttccaaccgcttatttcgtacgacccaatgggaatgaaacgcatagtaagtttccattaaatctccaaccagccactccatggtccttcacttatgacaccactccatcactctatatatgctcgtaggcaaaaactcactttagtacaacaatcaaagcctcttttccagttttcccttgtgatctctctctctctctcttttgttaagcaaaaaaaaatcccaccaaccaaagagtttgctttcaatttctaggatcaagccaaaatggtcttagaagagtgtgtagtgcatgatgttaggctatcctcagttgggccaggccgggccaccgggtcagatgtgttccataaccctagtgggttggatttggctatgaagcttcactaccttagagtggtgtacttctttgataatgaagctgcacaagacctaaccatcatgaaaattaaagatggcatgttcactttgttcaaccattacttcatcacatgtggccggtttcggcgatcggattcaggtaggcccttaatcaagtgcaatgattgtggagcaagattcattgaggccaagtgcaacaaaaccctagatgagtggctagccatgaaggattggcccttgtacaagttgctcgtctctcaccaagtcattggcccagaattatctttttctcctcctgttttgttgcaggtgcttaataatttccctatagatactatactaatttatatattatgcatcactcgtgacacacacttattagttattattcattttttatgtatgacaaaacctagtactactttcataggaattttttagtgtttttttaatcatgaaatggaatatttcatttctataattttcacactcgaaatcaaaatacaaccaattcaaactaatggagataaaaggttttttaattgttaatatttaactgatgaataaagttaaaggaaaatagacaccgaaaggccacaatgaaattagaggaagattttcttattaatctttatatttcttttgaatgttgagtattggttattccacatccgatgtgttgcaattaacaaaaaaattatttcaaaataagtattgtatttgactttttaatgtaacattaattctctttttcatcaagagaaatgttagtgacgttatttttaatactctctttttcaacactttttagttattggttgaaacnnnnnnnnnnnnnnnnnnnnnnnnnnnnnnnnnnnnnnnnaagttttgatggatctcacttatcatttaatgactctcttttataatttagatataaaatttatcaaaattgataattttaaaaaataattaatcacaaagagagtgttagaaagagaatgactttccaccaataactctaataaatatcactttaattttttgaaagactattattttccttcatttatttattatttttgtaaaatnnnnnnnnnnnnnnnnnnnnnnnnnnnnnnnnnnnnnnnnnnnnnnnnnnnnnnnnnnnnnnnnnnnnnnnnnnnnnnnnnnnnnnnnnnnnnnnnnnnnnnnnnnnnnnnnnnnnnnnnnnnnnnnnnnnnnnnnnnnnnnnnnnnnnnnnnnnnnnnnnnnnnnnnnnnnnnnnnnnnnnnnnnnnnnnnnnnnnnnnnnnnnnnnnnnnnnnnnnnnnnnnnnnnnnnnnnnnnnnnnnnnnnnnnnnnnnnnnnnnnnnnnnnnnnnnnnnnnnnnnnnnnnnnnnnnnnnnnnnnnnnnnnnnnnnnnnnnnnnnnnnnnnnnnnnnnnnnnnnnnnnnnnnnnnnnnnnnnnnnnnnnnnnnnnnnnnnnnnnnnnnnnnnnnnnnnnnnnnnnnnnnnnnnnnnnnnnnnnnnnnnnnnnnnnnnnnnnnnnnnnnnnnnnnnnnnnnnnnnnnnnnnnnnnnnnnnnnnnnnnnnnnnnnnnnnnnnnnnnnnnnnnnnnnnnnnnnnnnnnnnnnnnnnnnnnnnnnnnnnnnnnnnnnnnnnnnnnnnnnnnnnnnnnnnnnnnnnnnnnnnnnnnnnnnnnnnnnnnnnnnnnnnnnnnnnnnnnnnnnnnnnnnnnnnnnnnnnnnnnnnnnnnnnnnnnnnnnnnnnnnnnnnnnnnnnnnnnnnnnnnnnnnnnnnnnnnnnnnnnnnnnnnnnnnnnnnnnnnnnnnnnnnnnnnnnnnnnnnnnnnnnnnnnnnnnnnnnnnnnnnnnnnnnnnnnnnnnnnnnnnnnnnnnnnnnnnnnnnnnnnnnnnnnnnnnnnnnnnnnnnnnnnnnnnnnnnnnnnnnnnnnnnnnnnnnnnnnnnnnnnnnnnnnnnnnnnnnnnnnnnnnnnnnnnnnnnnnnnnnnnnnnnnnnnnnnnnnnnnnnnnnnnnnnnnnnnnnnnnnnnnnnnnnnnnnnnnnnnnnnnnnnnnnnnnnnnnnnnnnnnnnnnnnnnnnnnnnnnnnnnnnnnnnnnnnnnnnnnnnnnnnnnnnnnnnnnnnnnnnnnnnnnnnnnnnnnnnnnnnnnnnnnnnnnnnnnnnnnnnnnnnnnnnnnnnnnnnnnnnnnnnnnnnnnnnnnnnnnnnnnnnnnnnnnnnnnnnnnnnnnnnnnnnnnnnnnnnnnnnnnnnnnnnnnnnnnnnnnnnnnnnnnnnnnnnnnnnnnnnnnnnnnnnnnnnnnnnnnnnnnnnnnnnnnnnnnnnnnnnnnnnnnnnnnnnnnnnnnnnnnnnnnnnnnnnnnnnnnnnnnnnnnnnnnnnnnnnnnnnnnnnnnnnnnnnnnnnnnnnnnnnnnnnnnnnnnnnnnnnnnnnnnnnnnnnnnnnnnnnnnnnnnnnnnnnnnnnnnnnnnnnnnnnnnnnnnnnnnnnnnnnnnnnnnnnnnnnnnnnnnnnnnnnnnnnnnnnnnnnnnnnnnnnnnnnnnnnnnnnnnnnnnnnnnnnnnnnnnnnnnnnnnnnnnnnnnnnnnnnnnnnnnnnnnnnnnnnnnnnnnnnnnnnnnnnnnnnnnnnnnnnnnnnnnnnnnnnnnnnnnnnnnnnnnnnnnnnnnnnnnnnnnnnnnnnnnnnnnnnnnnnnnnnnnnnnnnnnnnnnnnnnnnnnnnnnnnnnnnnnnnnnnnnnnnnnnnnnnnnnnnnnnnnnnnnnnnnnnnnnnnnnnnnnnnnnnnnnnnnnnnnnnnnnnntttcctttaatggtagatctcaatttgagatcttagggagagaaaaagagagagaaaatttattcttttttaaacaatacacagattttgaaaatttttgtataagaacttattctccatgttggagatctcttcatttcttttattgggagatctagtgaagatcaaatcttgaattcaagatctttgctcaagatataacattaaagatgctctaagaatgtgtttatttcaggaaatgatgttttatcacattttcatattaatgtgtttgtctaatattactaaaaatattactaaaattttaaattaaaataaaaaataagagttgaaatggaagttataattgggcaagaacatgtatagcttcctacaaccccatagaaatataactatttcacctcttatcacatgaatagaaatgaattaaatgnnnnnnnnnnnnnnnnnnnnnnnnnnnnnnnnnnnnnnnnnnnnnnnnnnnnnnnnnnnnnnnnnnnnnnnnnnnataaaattataaaaaaaggaaaaaacattcattatttgtacaaatacattttttatattgattgaaaaatatattaaaaataagtatgttaaaaggaaaagaaataggagaaaaatgaagttgtagacttatagtgtccaactacatgatagaaaaataaaatagtagaaacaaaaatataaaattataattaaaccgactttaaaatcgtttaaaattaatcacaattttaaagtggtgaaaaatttattatataaatatttttaaaaaataaagtcgttgaattttttatgatttcattattaaaaaaaaatcaaaatcataatttttttaagactttatactcaaaaatcgtaaaaattcttattacttactttttatttaagaattaattaaagaatactttcatttgattcataatgaagttattttctcttggtgaaaaccccctctttatcgtgtcctggtttggttgaaatagtgacctgttaattagtcgcaatgtttttctggtagagatgttaataccatcctatcttcataagttgcccttacattaattcagaacgcagtatagtatggtatggtggacaattcctttcataagagggataaggtagatcctaactattcaacnnnnnnnnnnnnnnnnnnnnnnnnnnnnnnnnnnnnnnnnnnnnnnnnattacttgttttttatatataaataattccgaggtaatattttgatttttagtaatgtttaatcttcttataaattttttaacatttaataaataaatattatatgaaaaaataaatacaattaatgtcttataaataaaagcatttaatatttaatactacctactacatagagtaacaaagtggatattgtaggagtatttaaacctatctttaaatcttatcatacacatatttttggtatacaatgaagttttaatttactnnnnnnnnnnnnnnnnnnnnnnnnnnnnnnnnnnctctttctatatagatacgccgatattgatcagaatcgagtttatcaggctcatatttttggtatacaatgaagtttatcattaacacgttttttttaaggaatcattaacacgtttaaattcgataaagactgttttcctggggacatttaatataattttacatattatatacaacaaattgtcgaattaaacacaagtcatcaaaaataataatacggtaaaattattattgtttttattttttaatgcttaatacacgaacaagggaatgaaaagttcagaaagatgttttcctaatttgcataataaaaaaatgttttttaaaaaattaattaagagagatgtcgtcttaggtgagaggagtaatttttaatcattaaatataatcgaaaattatttaaaagacaattacattaatatcattgatgtcttatctccatttttaaaatgttccatccttactacaataatagtaaaagaagcaaaattttacataagaaaattagaagcaaaaatttgaaaatctcatttagataaaagagtataaatacgtttaatgtttctttttacttggtaaagacgaaatataaaaaaaaaaatctgaaaatttatttctagatggttattccttctatcactgtaaatcatacaacttggcttttgcaggtaactcaattttcgtttgatcaatatgcaggtaactaaatttaagtgcggtggaatttcattgggtcttagttgggcccatgtattgggggacccgctttcggcttcaggattcattaactcatggggcctaataatgaaaaatggcctaacaaagctttttaacatcccaagatccgtcccaacactcagacaacccgagccggaaaaggatccagtttcagcaaaacggtttgacccggtgggggatcattggatcccagccaacaacaaaaaaatggacacattctccttccacctaactagctcccggttgaactacttgcaagcacgaatttggggtccaagtcttgaccaaactcctccttttgaatccctatgtgccatgatttggcattgcgtggctcgggttcgatcaggatctgaacttaaaaccgtgaccgtgtgtagaaccgacccgtataagagggcaaatgatatcataggtaacaaccaagtgatatgcaaggttgaggctggaagtgaatgctcaattgttgacactgatttgacaatcttagctagcatgcttgcagatcaaggtgtggatgagaggaagcaaattgaggaagcagttgagagagaccaaggtgtgagtgatttctttgtgtatggtgtcaatttgacatttctagacttggaagaaaccaatgtgtatgacctacaattgaagggacaaacaccaaagtttgtttactacacccttcaaggggttggagatgaaggggttgttttggtgtatccgtggccaaaaggttctatcaagaatggagttgatgggaagtttgtgaccatgattatgccggaggatgaaatggtgaagcttaaatttgagctcaagataatcgatcttctgcttgaggataattaagttttaatgagattaagtatttttcaacaaattaattttttttatttgttatgtttgtgagcatggaaaacttttagattgtagtacataatttattactttaaagtcatgtgtatctcacgttaaactttaaagtcatatttgtctcacgttaaacatagatatgatgtggtgtgtttcttcttcctgcttttttattaaataaattatttccttttaaaaaaaagaacttaattgctttgctttacacaaagaattaatatttcacaaacacacattttaatataaaaaactaaactaaaattcagacatattttattttacagcaaaattaagagacacgtcatagttttaaaaatatctctattaaaataaattctaactttaaactaaatagagcttattaataatacagtttggttctctttttttgaatgtcaagcatgtcatttaatttgcttgaaaggactgttttaattttggtgatgctatttgatttgtatcgcgggtgaggtctctcctcatagggacaccaccgtcgatggaaatcggtacacgggataaggtctttggggttcttacttattatgctaggaatgcctcgtagggatttgttggggtattcggttttccatgtaacttcctacggttgtttttttggttgatgcagattcaatttcacagcttgtgatttggatgtctgcacctcttgtttattcacccctttatataatatacttccttttggccttaaatttctgtcaaaaaaagtaaattttaaacaattataacaaaaaaaaaaaaaagaacatgtatttgttcaccctcaatagtcaattcttcaagaaaaaaacataaaattaatataatgaaaagacaattcattaaaatggttgttaggagttcgagataaaataatatgccaagttctagattgcaattaaaaagcacaaatctgcatataaaaaattataaagcacaaatcaagggtcaatggtgcaattaaatgttttcagcctaaggctatctttgaagtttcctttcattttccatatattatatgtttatttataggcattgaagattgagtttaagtcaaatttcaaatcttaaattgacttggaaggatgtaatttgaaggtataaatcagctagagtttaatttctttatttggatttcattttaatactaattgacttaaatattatggtggctagctgctatgaatttatccttatgatcgagacaatgataaacaaagacaacctcaattacttcagccacacaatcatacttgtgtcacctaatgatgagttaagacggtgagttcttaaaatgttaactatttgattaattaaaataaatataatattgaaactttgttaaattaaaagaattaaatgtaattttgttccacctatttttgttcattcagtaactttgatttctctattttaaaattgagacatttgatcttcttatttaaaaaatttgtaattttaattttctcatttcaaaatagaaacatttagtccttctattttaaaaaaaaatcacaatttaatttttctattttaaaaaatttgtaactgtggtcaaattctcacttttgtctaattttatttcttttattttgatttaattgaatcataaatctaaaatattcatttaaggtatcattaataaataatttaattaattacagaaataaaaaaaatgaaacattgacaaaattaaagatttaactaaaattataaatttctaaaatataaaatacagaaataaaattacatattttttaaaatatgaagatcaaatgtttgtatttttgaaattggagaacaaaattatgaattttttaaaataaaagaaataaatatctcaattttaaaatagaaaaatcaaaattacatattaaataaaatagatgatgaaaaattacatttaatccaaattaaaattatttacatnnnnnnnnnnnnnnnnnnnnnnnnnnnnnnnnnnnnnnnnnnnnnnnnnnnnnnnnnnnnnnnnnnnnnnnnnnnnnnnnnnnnnnnnnnnnnnnnnnnnnnnnnnnnnnnnnnnnnnnnnnnnnnnnnnnnnnnnnnnnnnnnnnnnnnnnnnnnnnnnnnnnnnnnnnnnnnnnnnnnnnnnnnnnnnnnnnnnnnnnnnnnnnnnnnnnnnnnnnnnnnnatggtagatctcaatttgagatcttagagagagagaaagagagagaaaatttattcttttttaaataatgtgcagattttgagagatcttgtacaagaactcattctccatgttagagatctttccattttttttattgggagatctagtgaagatcaaatcttgaactcaagatctttactcaagatctagcactaaagatgctctaagaatgtgtttatttcacgaaatgatgttgtatcacattttcataaatattaatgtgtttgtctatttttaatattactaaaatttaaaattaaaataaaaataagagttgaaatggaagttataattgggtaagaacatatatagcttcctacaaccccatagaaatataactatttcacctcttatcacatgaataaaaatgaattaaatgatggtataactattattttaatgtggataaacaatactcaagaatatttttcaaaattcttaacaaacatgaaaaattcacatttctggctgtgaaacaaatagcccgtaatcatttaagtatattcttgagatatttaaaagtgtgtttgactaaattttaatattttcaaaattaaaataattaaaataaaaaaacaagaattaaaatgtaagttataattggattagaacataatttcctacaatttcatggaaatatatctttgtcactcttcatgaaaataaaagttaattaaatcattataactattttcctttaaggaataatattttttttccaaattcataacatacataagaatattatattctcataaattcattttaatccgtgaaacaaacacgccacaagtcactttatcaccacacgtcgttctaatacacttgataaagataaataagcacacctagccaggttatcatatagtttttattgatggccaagttaggatgttgggtgataaggactggggattaagcaaagatcatttgctcttttgacagttaggccaaaagacttggtcatgtctaattcttggtgtattgctccatttggcagctcccaaacaaaatggtaaagcaaattagccagtgacagcaacatgtaaggcatggaaaatgcagctccaggacaaattctccttccagccccaaaggggatgtattcaaagtttgtgccactgaaatcataataagagttatctacaaacctctctgcttcattccaatactttgattctctcccaatggcccgagcattgataatgactttgctctttgcagggatttcatatccattgatcacacatgtctcactgttttctcttgagactaataatgcctcacagggggtgtagcctcattgtttcttttatgactgaatttaagtattgacaatgtctaaggcctgtttcatccatataacctttcacattgaagacctttcttacctcagtctctgccttttccataaccttaggatttttcatgagttctgacattgcccatactgtaactgccgttggtgcagctgtcccgccaacaaacatgtcctgaaattaattaaccatcaatctaatttagaacattattaatagagtaaattagattaatatctatgacattttgtatacttgtcaaactcctttctaatgtttacaacaatttttcttatggaaaacatgatcacaattaaggagttagtgtaatatataaaaattatcaaggtaatatttttcaaacaatcgaaagagttattgatgaaataaagaaaaaaaataggagagatttcaccaggaatagtataatttactcttgataataaagctaaatatgtggtgtagcacaatccaaagctggtacatctttccgaaaaaattaattacaactagtattaacatttcaaataaaaaagggtcaaataatattttaatttattaatttttaaatttttataggatgagcaagaagctgccgtgtgagaaaaataagaatacagaggacaaaagttggcgtgagagatgtgggaacattgtcatgaacaaacgtgcggtgagagacgtagaatgtaacgaaaaatattttgacaatattttaactttgtataaatattttaaaaaataatatcataatttagtaacatttggttttataaatgttacaaaatggtcttattcataacattaagtagttaaatgttgctaaaaacatatgtagtagtggcttatacgacatcgcatcgcaattcccaaaaaataaaaacaacgtagacctcactcacgtctttgggaaagaagcaaagcaaaatgggcatggggtatgggcacccaggcagttgaagacttctccaagaaggcaataatttagggacccctttcgaaattggccaaggaataaaaatgtagccaattagcaacagggggagtgatgaggtggacccaagggattaaggtatagccgtatagtttgttctgtttttcctgctattaattggtaagctcatttagatatttaaggatgacccaagggattggtatagtttgttctgtttttcattaaaatagaaccaaataaatgaaatgaaaaatattatttaattatttcataataggataaaataaaaatcctattccaatccatatggaacagaaaaaagaagaataaaagaaaatgaaatataatctatttaataaagaaagaaaggaaaagagagagttgttatccacttattttatagataaagtattttaactggtaaaattttaattttcttgatcataaagtatatataaaagagagattattttcagattcaaccttatcaccaacaaataatcaaaatacaattttattattttatcagaacttatcatctaataaacgaagtatatcttctcaagaaaacaagtatagtacaatcacttattttgcatagaaagaatattttaataacttgctacttcaattatatatatatatatatatatatatatatatatattataagtgtaatttattatgttagtaaatttcatatctatgtatatagttgtatatatggaaatcttcaaaagtaatcctaaagaataatgcataccgacccacatgagtgctttgctgttgttgtgggtcaagggaatttccaagtcatctctcttttgagttttgagaagaatatcaataaaatcctcgtgcgtcactccatgcttgttcctattttccttgtgatccttgaccatattttctaggatcttgtcattctctctgtgctctttcaagtttagttttcattcctgtgagccaaggaagcactttgattgaagggcagatatcagcaattgagaaacctcccaacagcagtagcatttgctccatcgttgacacgaaagcttcttggtctttgcattttgtaccattagctgcccttgcaattatagcaattgtcactgactcagtaataagattgataattgacccttcatttgcacagacatttctaacaagtttataatcgtttcttctcttatgtgccttagtgattgaacatgctttgcattcaacaactctgaaatgcaacttttttttagttgcctccaagctcttccgtaagaagagagggctatgtcgctgctatcatagacaatgaatttggaagcaagaagatggggcctatttgcaaagatggcatcatgagttttcataatctctttgtcaatatctgctgaagagactattatgtgtggcttttcaccaagttgtaggtgcatcaagggtccatgttggttagccaagtttgccaaagtttggtggggaagtggccccagaaattggtgaatcttacctagaagagttagtttccattgtccaagtggcaagtttttggaatttgaacgattcagagtgttgaacaatgcaagcaaaggtgaataggaagagggaataagaagctcactccatgttaagaaataaaatgttgtatatgcatgactggaatggtaagttcttcgggcttataaataaacgagtggtttatcacgtactggaacaaactcaacgtaggggcagattcataattttggatggaccgacacacacaaaaaaaaaaaatgaacggacatccatcatatcattagacacctagtgactgaaaaaaataatataaatattatacaacttatgatatgatcaaaaaaatattagatattagaaaggtgtttaaaataaataaataaaaatgtttctttttgcaatttgaagcaacgcttggaaaaccacttacaacacaaacaattttgtaccacatgcttaccgttgacaagattaatggagatcaaaatggaacatggtaaaaaaaatggtggaaaaggtagatgcatcaaaaaagtcttttggtggaaaattgtggtacttcaagagatgttgagacgtcaagagttaccgttttcgatgtatattttcttttgtcattttttgaagtttatttatttgatttaaaaatatataatattttttataaaaaaaaataacctattcacaattatttttaatcaaactatgtgagtttttagttctttaaaattaaaattatttttctcttatttatgttaaaataagaaaacaaatatttgtacaatcaattggcatgggtgattttttcatcaaaaaaattgggatgggtgatttagagaagacgttggatttaatttctacctttccaatgcacatgcgactcttaaattttaagatttttcattttttccatatttcaataaaattagtggtgactccactaaagaaaattgcgaagatcaagcccattaaattaattgtgacaatcatttttatctttaatttgttgatttgttaatatttgtgttgtcttttaatttcttttaaatccatagtgttgaattggtaacttggggctatttttaagaaagttcttgtcataaaaaaggtaaataaacgtggagcgatggtagggaccaacacccttgggaccttctctcacttgggactattttttaaggataccctggatacgtaattctatacataacaattaaatttgaactcgtaaatacttatctgattccgatttgatgttgatgagaaaacctattttaaccatggttgagttcaggcttttcctattttatagaaacaccaacgcttatagtgttgatgcttttgactttaatacacatatttattatagggtataagtatgaatgaaatgctgtatatgcatgaatggaatggtaagttctgcatgctctatagatagataaataagtgctgtgtggtttatcatattttggaacaaactcaacttagggatagattcataattttgagcggaaacgatttagtgccatttatgcaacaattgtacaagacaatcaattttgtacattgtaccgcttagtgtagacaacattggaaatcaaaatgaaccgaccgtgggagaatgcatccatcaattatcagtctaaactctaaacatttaaaaagagtttatgtttgatatagtatgatcttgacatttttatagtctaaataaagagttgtaacacaaaatgacggggatttatagattttccatatttcaaacccaaacaagattgtttgcaataaaaatattttacgtgttgttcatctgttttttgtcagaaggattgttaatgaccaatttggtggcagatgcttttggttaagaaggctttgtcctgcactagctctttgagtttatttgctgcatgctgatgtagcaagtttttgggttgcttagtcttacttagtttgttgggcttgagtcccttttaaaaattaaactccatatattttaaaaattaatttgagttattcttacttcatctgttttaaattataagatataattgataaattcatgattaataaaaaatttaatcaatttagttattaacattaaatttgtctatatttattatatttttttaatataaaaatcttaattttattgaaaatttattcattttttccaattttcataggtgaagaaaaagataatttaaagtaatttagttaaaaataatttatacatgaaatgaaatcttataataataaaaaaaaaacttgttgagtatgtcttatatttgatgaccagttagtttatgcatgttcctctgatgttagtttaaagattttgcgttggaccggttcaacctacttcaccgtgagtttttaccggtttgtacggtttttgactagtcttaccggtttttgaacggttctttatccaatagttttaagagtgtgacggaccgaataataggacgatatttatttgaaccagccggtttgatttaaaaaactgtgattacatttcatattgtctcaactcgatgtaatattttattatttttagaacatacaaaaaatcctaacactatataaataatactttgtatgacacgaatttatattttatattggtatgttttagtacattctgggcttttgatatttattctgtctattggtattattatattcacataacaattactctctaacagaacattataattttgcccaacaagaacggattgaaaaatatgtttgtgactttaaaaaatgaaaacaacattttatcaatattcttctcactttgaagaaattacacattactcgcttagctcttaaaatatacactgtattattctctcgagtgatcaatatatatacacaatactcctgtttcttttgaaaattacacttgattctctttgatagagaaatatatattatactaatttattttgatgtaaatcttaaaggactattttcgttctctgcaacactcaacatcattactcagaaaaaagaagacacaacaaacaggatacaaagtgccacaataagctgtcgatcgtacacaagagtgcctcgttcacttgtttcaatgattttggtgaaagttattcttgcagtagcaaccatgattattgttatattttcagatgctgtgagcagccaacagatctgtattggatcatgcgaagacactccaagctgtgatgcccactgcaagttcataggctttgggaaagggacatgcttcatagcctcacctgcatattccaagtgctgttgctcctaagatggtagacaatatttttgaccaagagttttcttcatatatagggttgcaagtaagtaatgtattttttttaataattattagtttcattgttggaaataacaaagaggattgtaaggggggccatctcactagattgaccttttgttgttgaaaaacatactttgaaactattacatgtgatcagaaattagaatcaaattcttcttttcccattccctgtcccccaactgaaattattagttgtcctaacttatgactcttaaatgggaagaatccccactcaccctttacttcacggttatcttatagaaagttatcacaagttacaaatttgcaacactttggcattacaacttttattgataaatgcaaattaatcctcctctttatttctctctctttggtcgggagaatgacatgtggcgtaggtatggatatgggaacgggaaggacaacggtgcctcatgggaaatcaatctcataccctctttttacaagacaacatggtatgtaccattgacaatgtcaagttaatggaaaatcaaattccataccctccttttacaagacaacttggtatgtaccattgacaatgtcaatttagttttaatttaaagttaaattaatcaatgtcaagaacaattattggtccaagtaaaattagattcaattttttttatatgtaagatttcaaatttaaattttataaacaaaaaatatatatataattaaaaaaaataccacactaaagataattaataaaattttctgacataaattagttatcagtcaaaatagtaaaacatgtataatgttaaccaatatttaatcaacgtcacgatttactaccaaaacttacacgtgtcagacactaaaccaagcaaccgcaatgctcacaactcatcacctgatgtaacttttatgcatcaatttattcacaacatcttgaaatatgctcagatgcatattaccttattcgtattcatatccattagcttccgaatcataatgcttcattttctgtatgttattttgctcattcaatttggccaatttcggccagtttccttttgattcctacttccaaccactgcataattaatcaaaccaatactttttttcatttatcactgttggggtaaatgtgtgtatatatccaacatccaatttattatattatcaatttttgtaaagaattattttttattttattattataattatttttattaaattattaatttgataaatctttgattaaagttaaagatttattatcatgatacagaatatgataatgagaaaaaattcatttataattttaatctaaattgttcttgatagtaggattattctaaataggacattaataattcagatagatcaatatatatgtgatggtatttattgaataaaaattaatgaatctcatttattaaattacatatatagaagataatttacatgtgaatatcattatttaactgactcaattgagaattcctaataattaatattactttgacatgccaataggaagttcttaagaagaaatataataattttctttaatttgagattatcatagtaattaataaattatttgttatattttaattttggacacctaatgccttatgatactagttaaatgaatattggatatgattaaatacttgtagaattaatgattaattaagaagaaaatcatcaactctaggtaatgagtttgagttctataatagaattaagaccttgactagaacaattaaatgaaaggagaaaagagtttcttaagtcatccattgattaaatataatatgttaacttattagaatttgatagtaataatatactctagagttaactttgagctgtaaatgatggaaaaaattattacgttattctcctattggttcttgaaggtaaaaaaaaaagttacttcatgttatccggaccttaagaagtgttgttagacgcctatcttgattagtaaattaattgtgattaatttactatcggtctagtgttgaacctactagatcacacacaaacgagtgttccaatttttgcaaaaaaaaattatttcataattaaattaaagaatttaatttaatcaaataaatattttagtagaatattattatattcttcattagtaccaagaatataattaatataaataaagagtattattatataaaatgtggtagttgtctataaataagaataaatttttattgctacatatcaagattagatcatgtgacaagttatcgtaattaatcatgattatttgataattatttttcttatattaggaaacttcttagcataaaaaagatatgagatgttttttattttcaaatataaaaatagagatacgaaattattttaaataaaatctctctttttaaaagtctcaaatccatatatatttaatattataaattccatatatatttaatattataaattgaaacatttacatgaaatcagagtgtactagatcaaagtagaaattcaattttaatttttagacttgaaaagtagaaaaagatgttgttctttagagtttctcttattaaaaaattgatagcagaaattaatttcaatatagatatatttagagttttcacattattaaaaaaaattattgtttcaacaactcacaatcggatacacaaatttatttatttttaattaccattactgtatattttaaatataaaatagatcctaatttttcgagaaatgttaaaactaacaatcaattggcgaataacatcacccctaaagtcatacacattttttcttaatataacacgtttcatgaggtgctttcaaattgtataatttgtggagtttaattcaatcatatttgacccttgacaaacgaaagttcctaatgaccaaagtccaaaacattccggaaaaaaaaaaaaaacaaagtccgaaattatatttctctctcccaccttacacataaataggcacccagaaaatcttctcaccgcccaaataactaccatatgacacgtttcataaggggctttcaagttgtataatttgtggagattaattcgatcatatttgacccttgatattaaaccaaacttcctaaagctactggttggtaaccaaaacagaaattttttccaccttacacataaataggcaacccaaaaatcttctcagccgaaacaaatttgttggtaaccaaaacagaaatttttttccaccttccaaattgtgtaatttgtggagtttaattcgatcaattttgccggatcaaaaagaaaattcaatcatatttgacccttgatactcgtccatttaaatgcataaacgaaaaccaaagttcctaatcccacttgctggcaacctaggtccaaactatttttctccctcccaccttacacatcagtaggcaccccaaaatcttctcacagccaaaataacaaccacacagaacaatccataaataaagtattaaaaaaattgtcaagacatcgttacatgtcagttgaacagtttttcaagaacaattttttaagtttttattttattttactcttttttattctcccttcctctttagttttttttcttagaattttttttgcaatacacaggtctagctgctagttacactaatagtgtgtctagtttaaaatcacttttagcataattgattaaaaaatctaaagtgaagctataaatagttaagtactagcttcaacttatttataaagttaccatgattttatggactagactcaaatctcactttattatataaacactatttgagttccccttagaatatccaaaattacaattgaaataccaacgaacataattttcaattaatattcacatatttaattttccattaagaagttaattcttaatctaatcaattgagttaaagtaattataaataatttttgcattaaataaaaaatttatcctaaattttattactaacttgcttttagaataaaatcatctaatgatctaaatataaatccattaacttcaaaagccattttatctaaaaccaattttgcaaatgctaaccaaaacacactaaaatggcctagagacgttaattcagccgactattagttagcacgcttaaaactgtgagtagagcaatgggccaagggcacgttttctcaacatcaactttatatctgatttgatctcgagtacgaagatgtacacattatctattgtctatatatacaactagttacattaaatatagagaactaaggaaaatcctggtcatgattcatttgacaattcatccttctgctggcgcattcgtgctgcccatgacatattccctccaacatccttgctgttacttcttctcttcagctctgacagttgagatttccacctagctttccattcacttttttgttcaaccacctgattcaaaaccaacagcttagaatcagtgagcaaaccaattagtgttctagccaaacacctttacccgcttttcttcaatttaaaattagaaggggaaaaaaagtgaattagacaactgaacaagcaaatacagtaaattaagaaatccctatctctttaggatgcatgatttatgaattcccacttactcattaccacgataaaaagaaatttccgaacagtagtatatgaataaagaaataattaagatcacactcaatctcattcgcagacacgtttcatcatcattattattgttattgttaataatactaatatttatatcctttcacactgttagcttgcacagacttttaatacgttgaagagccatttatacatgttacagcaacaacacacttattcagtttttaattttttatggtggtggctgggattgaagttgacatattcaaaaagatttaaattttttttggaaaaagaacaaaagccgtaatagaaatccagaaacaatgtattcctaccaggaaacgtcataaggaagtatctgccgaaagccctcataatttatgaaaatagaatgattgggtgtaggtacagtgcagaagttaatagatattgcataaaataacacaagctcacagcaggaagaatctgttataccatcatgaaaaagaaatttaacttgtaaacagattttcatgtgctgaagaggcaactacaacacacttgttcagattttgtggcggagaggctgggattcaagtcgacatattcgaaaaggaaaaaaatggaaaaagaacaaaagccagaatagtcctcataaattataaaaatatcaattatgtataggtgcagagcagaagtcaaattctgtaatagacacattaaatattaatataagttcacaaacagcaggaggattctgtgataccatcatgaaaaagaattccaatagaagcaaggtgaccgctacaactgtaatttttggaaaacaaaaaacatagaacagagaaagaatcaagttcctattactaacttataaaaagcacccagaaatataaaatatcagaactcaaacgtgcatgatgaagcaattcccattccaggtcaaagttacagtcaattgctttgtttgctgactgagataggtgaacaaatcagtagtaagacaatatttcagattagattaaattcaaatcaaattttgaatcaccaagctaatttttcaattgtgaatcctaactcacatcaaatcataagtttagacacaaagtgaaaaacagccctagtatatcagataaacgatgtatagagctcaatgtataattttaaactaggaattgaaaaaaaaatacatattatccataagtttcacgaaacattataagccatatgtaatatgtcgtaagttaaaacaaaaacaaaaataagggcacatggattgggtgggttagtgtaagtgtgcaaaccctttgtcatctcagaattaagagaaaaaaaaaaaaaaaaacagaanntagcatgcacagagcgagagactgtgcaaatggaatcaaagtaaaagaacaaccaaacaacattcactaagcagcactatacctaattccctattcctttttatttcacaatttaaacttatttaaattttcaatatctttaacgaggactgttaaaagaaaagccacccaaaaaattagaaaacacaacaaattattgaatcatatcatacatcgaacaattcaaagcaatttgcaattcatcctacacttgccaaatcatacaattcaaatggcgacaaatgataatggttagtttgttagcagcttcccttttttcttaaccacccatgacccaaccaaccttatatctcctgaaatggcgaatcatgtgattcaaataaaatgaatggaataattaaaaagccctaagttggctggcgaacctgatcgtggtaattatagcgtcgacgagcgttgaaggcgaagttgatgcccctggccatgtccttatcgtacatagctcttcgggaaggatcagataaggtttcgtaggcctcctgcacctgaataaacctcttcgtgtactcttcgacccgacccggtggtgacacgtccgggtggtactttcgggcgagttgcttgtaggcgttcttgatctccgttaccgaacccgattcgggtatgcccagaagctcgtagaagctcagctccaccacgaaaccctcgttcttattcagggtcgcctttggaaacgcgattcgggtcgtgataatgggtttgttgggcctcaagaacactggagatacggtggggacgcagaagcgctggtcgcttcccggtacgattaaaccataacaccgcattatctctcaccctttcttcttctcttctctctatcacactctcgctcttactacttcatttgctttgcgtgtgttttggtattactctttatgacttatcgattttatatggttctcatttcgttttttatttatttttgcgtgattggatttcaccaaaaaaataataagttttacgagattggtttgtactttgtggttagctgtcgttttagccttaagtaaacgtctgggaggccaaggtgtggcctttgttcattgggtgggttatacacatctagatttttttttaagttgtttttacaaaaataattcttaaacatctatcacatatattttacaccaaagaaatataaatatgacaaataatacatatgattaataataggaagagggagactgagaaaacttatgtgccaatggagtttactggtgtaaaattgtgaagtgtccaaaatcatagacattattttacagcgtgtttaaatcatcatccctgaataataaatgtgtaagacttatgtatttattttaccatgtgtttcgaaggcaatccttttaccacattgtagaaaattattagtcccttttctaaaacctaatttgctgatatataaaggcttttatattattattttgttatatacgaaaagaaaaaaaaggttcatatgtatatagaagacctatccattctaaagaaatcagagaaacaatgtaacccaacaatttattattcctatttcattactattactgtattatctgatatttaaaattaatatattttttccagtaaaaaaagaaatgatataattttttatttatatctaatatatatatatatatatatattcatcatttaaagtattccaactattattttcattaactaaattactctannnnnnnnnnnnnnnnnnnnnnnnnnnnnnnnnnnnnnnnnnnnnnnnnnnntcacgtgaaaaagtctaaatcatataatttcactcctaatctcttaagaattaaactaagtaatttgctttaagaataaatatgcatagataagggtaaataacatcattttatttatagacatgaattacctagaagctcctttaagttcttagggtaaaaatatttttcaatgattaaaatcgtataatatacatatgaatgggtgatcaaatcataaataagacaataaacttaaatagaaagcaataatattgaaataacattaaatggatagtaaaattcactacatcaaagagtatttggtattcaaaccccaacaatggataatttagtatctcataatcattatgagagactaaaaaacaaaagatgaaacaaaggaaatggaagaagagctcccaagtgactcttttgctctattttgtgcccttgctgactaactccctttaaaagcacattgtcacatttttataatcttcgaaatgttgcataatcatatttttcaaaaatgactttgcgctaagtatgcatgtgtgcgctgagcacacatccaaagtacaattgtcttaagtgaccatgcactaaatcctaagcatgcgcttagcgtgcattggcatggtgagcatataatgcacattaaattcagtgttctaattttttcaataacttccatacctcataaagaagttaaattcctaattttttaagtaagaaaaaacattaaaaagaagaaattaaataattgtcatgtaatttaaatgtacaaattaaatattctagtaattattacctattaaaaatattatcatatattaaatatgaaaagatttcccaaaatctttagttgttggttaagggggatttaattgttctcaaataaaaatgcaacaataattgatttataatacaataagtttactcctctaaaaaaacaatacaataagtttactaaagatacatttgttttagagattcgctaaatagttaataacatagttgacaagtgactgtgatatcatgctcaataaaaatattagtatcatatattgttttaagtgcataagttatacgtacatcaacgaaatgaaaaagtgcatagtttatacgtgaattctacattttaaaaacgaaaaaaaaatgcaaataaaataatgggatttgatttaggtaacgtaaaaagtcagtctagcaaattaagatttaaattcttatacatttaatacttatcatttttggatttaaactttaaattttccctcaggatatgcttgcaacgataattttaggaaaaaaaaatataatcagatttttaataaaagtataaaccttttttaattctttatgaaatattatattttattttaaaatatgcatgttaatacttaatattaattatagtatattcgaaaggataaaacagattttttttattcagttaaagataaaacttagatgtggtgcttcaatttggttttttgtattatttttattttaatttgaaattaatctttgataacctatgttgactcttcatataaatctttattatatattacatccattttttttttatccgtcgtttacgattgtttttgtagaaaccaataaataaaataatttttttattatgataaaatagttgttaaattttctatttcactcttttatctttttactccacaataaatatatgtgtaaattaattaaagataaaaaacaattaaggatataattgataaactcataaaagtacgtataattaatataattttgaactccgcaaactacatataaacatgaaaaaaaaatctttaaaaatttaacaaataaaaaaggaacgannnnnnnnnntcacacactattgcaattaataaactctttcgataattgtcctttttgggaggtttgaactttaagagttttcctatgaggatatgctatggaagataacgttagagggggaaaccttacatgatcaatttttcgataaaatataatccaattttaacttttatgaaatattttttattttaaatacgtatatttatttatttacgtttcacatgtcaaatttaatattttgaattttttttcattgacaccaaagtcataaataattgatccactgttaattttaatataatcttttttagcatgtaaccttcaggataaattaaaaattaaataaataaataaaatatcatgtagtaattgtaattgaagattgttaacattagatataaataaaaatatagataaataaaacacaaatagatagtgttcctacattagtattttttttccttctatattagccctatatattttagatttacaacattcaaatgagactgcctnnnnnnnnnnnnnnnnnnnnnnnnnnnnnnnnnnnnnnnnnnnnnnnnnnnnnnnnnnnnnnnnnnnnnnnnnnnnnnnnnnnnnnnnnnnnnnnnnnnnnnnnnnnnnnnnnnnnnnnnnnnnnnnnnnnnnnnnnnnnnnnnnnnnnnnnnnnnnnnnnnnnnnnnnnnnnnnnnnnnnnnnnnnnnnnnnnnnnnnnnnnnnnnnnnnnnnnnnnnnnnnnnnnnnnnnnnnnnnnnnntattaacatgtttaagcccacttttttttttcttataattattaaaaaattgttgttttaataatcatagaaaaaaccagttctataagtaacatcttttattattcttaaaagttgttataactaattttctatatgtaattctattttgacgtgtagattatacttcagacagttgacaaataccatttggcccactttattaacatgtttaagctaacttgtattttttaatagttattattgaatattatccttctttttaggagtcattgaaccttgtgcttaaatatacttctcaaatctacatcactattcactaacatgttgcacacggtttaaaatctcccaaattgcatccttacaaacaataaagaacatacgtaactaaaaaccttcaccgttattttttataagcnnnnnnnnnnnnnnnnnnnnnnnnnnnnnnnnnnnnnnnnnnnnnnnnnnnnnnnnnnnnnnnnnnnnnnnnnnnnnnnnnnnnnnnnnnnnnnnnnnnnnnnnnnnnnnnnnnnnnnnnnnnnnnnnnnnnnnnnnnnnnnnnnnnnnnnnnnnnnnnnnnnnnnnnnnnnnnnnnnnnnnnnnnnnnnnnnnnnnnnnnnnnnnnnnnnnnnnnnnnnnnnnnnnnnnnnnnnnnnnnnnnnnnnnnnnnnnnnnnnnnnnnnnnnnnnnnnnnnnnnnnnnnnnnnnnnnnnnnnnnnnnnnnnnnnnnnnnnnnnnnnnnnnnnnnnnnnnnnnnnnnnnnnnnnnnnnnnnnnnnnnnnnnnnnnnnnnnnnnnnnnnnnnnnnnnnnnnnnnnnnnnnnnnnnnnnnnnnnnnnnnnnnnnnnnnnnnnnnnnnnnnnnnnnnnnnnnnnnnnnnnnnnnnnnnnnnnnnnnnnnnnnnnnnnnnnnnnnnnnnnnnnnnnnnnnnnnnnnnnnnnnnnnnnnnnnnnnnnnnnnnnnnnnnnnnnnnnnnnnnnnnnnnnnnnnnnnnnnnnnnnnnnnnnnnnnnnnnnnnnnnnnnnnnnnnnnnnnnnnnnnnnnnnnnnnnnnnnnnnnnnnnnnnnnnnnnnnnnnnnnnnnnnnnnnnnnnnnnnnnnnnnnnnnnnnnnnnnnnnnnnnnnnnnnnnnnnnnnnnnnnnnnnnnnnnnnnnnnnnnnnnnnnnnnnnnnnnnnnnnnnnnnnnnnnnnnnnnnnnnnnnnnnnnnnnnnnnnnnnnnnnnnnnnnnnnnnnnnnnnnnnnnnnnnnnnnnnnnnnnnnnnnnnnnnnnnnnnnnnnnnnnnnnnnnnnnnnnnnnnnnnnnnnnnnnnnnnnnnnnnnnnnnnnnnnnnnnnnnnnnnnnnnnnnnnnnnnnnnnnnnnnnnnnnnnnnnnnnnnnnnnnnnnnnnnnnnnnnnnnnnnnnnnnnnnnnnnnnnnnnnnnnnnnnnnnnnnnnnnnnnnnnnnnnnnnnnnnnnnnnnnnnnnnnnnnnnnnnnnnnnnnnnnnnnnnnnnnnnnnnnnnnnnnnnnnnnnnnnnnnnnnnnnnnnnnnnnnnnnnnnnnnnnnnnnnnnnnnnnnnnnnnnnnnnnnnnnnnnnnnnnnnnnnnnnnnnnnnnnnnnnnnnnnnnnnnnnnnnnnnnnnnnnnnnnnnnnnnnnnnnnnnnnnnnnnnnnnnnnnnnnnnnnnnnnnnnnnnnnnnnnnnnnnnnnnnnnnnnnnnnnnnnnnnnnnnnnnnnnnnnnnnnnnnnnnnnnnnnnnnnnnnnnnnnnnnnnnnnnnnnnnnnnnnnnnnnnnnnnnnnnnnnnnnnnnnnnnnnnnnnnnnnnnnnnnnnnnnnnnnnnnnnnnnnnnnnnnnnnnnnnnnnnnnnnnnnnnnnnnnnnnnnnnnnnnnnnnnnnnnnnnnnnnnnnnnnnnnnnnnnnnnnnnnnnnnnnnnnnnnnnnnnnnnnnnnnnnnnnnnnnnnnnnnnnnnnnnnnnnnnnnnnnnnnnnnnnnnnnnnnnnnnnnnnnnnnnnnnnnnnnnnnnnnnnnnnnnnnnnnnnnnnnnnnnnnnnnnnnnnnnnnnnnnnnnnnnnnnnnnnnnnnnnnnnnnnnnnnnnnnnnnnnnnnnnnnnnnnnnnnnnnnnnnnnnnnnnnnnnnnnnnnnnnnnnnnnnnnnnnnnnnnnnnnnnnnnnnnnnnnnnnnnnnnnnnnnnnnnnnnnnnnnnnnnnnnnnnnnnnnnnnnnnnnnnnnnnnnnnnnnnnnnnnnnnnnnnnnnnnnnnnnnnnnnnnnnnnnnnnnnnnnnnnnnnnnnnnnnnnnnnnnnnnnnnnnnnnnnnnnnnnnnnnnnnnnnnnnnnnnnnnnnnnnnnnnnnnnnnnnnnnnnnnnnnnnnnnnnnnnnnnnnnnnnnnnnnnnnnnnnnnnnnnnnnnnnnnnnnnnnnnnnnnnnnnnnnnnnnnnnnnnnnnnnnnnnnnnnnnnnnnnnnnnnnnnnnnnnnnnnnnnnnnnnnnnnnnnnnnnnnnnnnnnnnnnnnnnnnnnnnnnnnnnnnnnnnnnnnnnnnnnnnnnnnnnnnnnnnnnnnnnnnnnnnnnnnnnnnnnnnnnnnnnnnnnnnnnnnnnnnnnnnnnnnnnnnnnnnnnnnnnnnnnnnnnnnnnnnnnnnnnnnnnnnnnnnnnnnnnnnnnnnnnnnnnnnnnnnnnnnnnnnnnnnnnnnnnnnnnnnnnnnnnnnnnnnnnnnnnnnnnnnnnnnnnnnnnnnnnnnnnnnnnnnnnnnnnnnnnnnnnnnnnnnnnnnnnnnnnnnnnnnnnnnnnnnnnnnnnnnnnnnnnnnnnnnnnnnnnnnnnnnnnnnnnnnnnnnnnnnnnnnnnnnnnnnnnnnnnnnnnnnnnnnnnnnnnnnnnnnnnnnnnnnnnnnnnnnnnnnnnnnnnnnnnnnnnnnnnnnnnnnnnnnnnnnnnnnnnnnnnnnnnnnnnnnnnnnnnnnnnnnnnnnnnnnnnnnnnnnnnnnnnnnnnnnnnnnnnnnnnnnnnnnnnnnnnnnnnnnnnnnnnnnnnnnnnnnnnnnnnnnnnnnnnnnnnnnnnnnnnnnnnnnnnnnnnnnnnnnnnnnnnnnnnnnnnnnnnnnnnnnnnnnnnnnnnnnnnnnnnnnnnnnnnnnnnnnnnnnnnnnnnnnnnnnnnnnnnnnnnnnnnnnnnnnnnnnnnnnnnnnnnnnnnnnnnnnnnnnnnnnnnnnnnnnnnnnnnnnnnnnnnnnnnnnnnnnnnnnnnnnnnnnnnnnnnnnnnnnnnnnnnnnnnnnnnnnnnnnnnnnnnnnnnnnnnnnnnnnnnnnnnnnnnnnnnnnnnnnnnnnnnnnnnnnnnnnnnnnnnnnnnnnnnnnnnnnnnnnnnnnnnnnnnnnnnnnnnnnnnnnnnnnnnnnnnnnnnnnnnnnnnnnnnnnnnnnnnnnnnnnnnnnnnnnnnnnnnnnnnnnnnnnnnnnnnnnnnnnnnnnnnnnnnnnnnnnnnnnnnnnnnnnnnnnnnnnnnnnnnnnnnnnnnnnnnnnnnnnnnnnnnnnnnnnnnnnnnnnnnnnnnnnnnnnnnnnnnnnnnnnnnnnnnnnnnnnnnnnnnnnnnnnnnnnnnnnnnnnnnnnnnnnnnnnnnnnnnnnnnnnnnnnnnnnnnnnnnnnnnnnnnnnnnnnnnnnnnnnnnnnnnnnnnnnnnnnnnnnnnnnnnnnnnnnnnnnnnnnnnnnnnnnnnnnnnnnnnnnnnnnnnnnnnnnnnnnnnnnnnnnnnnnnnnnnnnnnnnnnnnnnnnnnnnnnnnnnnnnnnnnnnnnnnnnnnnnnnnnnnnnnnnnnnnnnnnnnnnnnnnnnnnnnnnnnnnnnnnnnnnnnnnnnnnnnnnnnnnnnnnnnnnnnnnnnnnnnnnnnnnnnnnnnnnnnnnnnnnnnnnnnnnnnnnnnnnnnnnnnnnnnnnnnnnnnnnnnnnnnnnnnnnnnnnnnnnnnnnnnnnnnnnnnnnnnnnnnnnnnnnnnnnnnnnnnnnnnnnnnnnnnnnnnnnnnnnnnnnnnnnnnnnnnnnnnnnnnnnnnnnnnnnnnnnnnnnnnnnnnnnnnnnnnnnnnnnnnnnnnnnnnnnnnnnnnnnnnnnnnnnnnnnnnnnnnnnnnnnnnnnnnnnnnnnnnnnnnnnnnnnnnnnnnnnnnnnnnnnnnnnnnnnnnnnnnnnnnnnnnnnnnnnnnnnnnnnnnnnnnnnnnnnnnnnnnnnnnnnnnnnnnnnnnnnnnnnnnnnnnnnnnnnnnnnnnnnnnnnnnnnnnnnnnnnnnnnnnnnnnnnnnnnnnnnnnnnnnnnnnnnnnnnnnnnnnnnnnnnnnnnnnnnnnnnnnnnnnnnnnnnnnnnnnnnnnnnnnnnnnnnnnnnnnnnnnnnnnnnnnnnnnnnnnnnnnnnnnnnnnnnnnnnnnnnnnnnnnnnnnnnnnnnnnnnnnnnnnnnnnnnnnnnnnnnnnnnnnnnnnnnnnnnnnnnnnnnnnnnnnnnnnnnnnnnnnnnnnnnnnnnnnnnnnnnnnnnnnnnnnnnnnnnnnnnnnnnnnnnnnnnnnnnnnnnnnnnnnnnnnnnnnnnnnnnnnnnnnnnnnnnnnnnnnnnnnnnnnnnnnnnnnnnnnnnnnnnnnnnnnnnnnnnnnnnnnnnnnnnnnnnnnnnnnnnnnnnnnnnnnnnnnnnnnnnnnnnnnnnnnnnnnnnnnnnnnnnnnnnnnnnnnnnnnnnnnnnnnnnnnnnnnnnnnnnnnnnnnnnnnnnnnnnnnnnnnnnnnnnnnnnnnnnnnnnnnnnnnnnnnnnnnnnnnnnnnnnnnnnnnnnnnnnnnnnnnnnncaatgaggtattatttatgattgaattaggacaaaactcacattttaattaaaaatatttttaaattcaatttcagactatattaaaatatagtgattaaattaccattgagtgaaatgtcaaaattaattggttattaaactttaattaacgatttgccaatcaaaaagttagaagaataaagtaaaaattgataaattatatagtgttgcttctcatgtgcaacttaacttcataagtttcgtcttttttcttttgtcactcatttttgaattcatattagattatccaaatccacattgacatactagctagcacgtaagtatttacatgtttgacattacgttaaggaattgattttatataaaaattgatcaagttaaatcgattttaagtttcacagtcaataacaaaatttacactgaactttattactgacatagttttgaaataaaaacatcaaacataatttttaacttaaaaatcagttttacagacattcgtcatggccatcattatgcatatgtcatcaattgttttcattacttagaaaggctgctgctgaaaaaagaatacaaaaacttgcttagattagtacaccaattaacttgacgacaaaacgggaccaagaaacaaaataattagcagttgtacgcttgatagtctgttttttcttgcttagctggtatggtagactaaatttgatcaggacaccatttctatccaacgacgatgacgtgtacatgcaatatatatatatataaaactccatcctatattaataataggtaaagaaaaaataatcttaaaataattatcattttaacaaggaaacataaaatttataaatgaattaattttataaaattattattctcttttatatatttattattattttttaatttatgtaatacctagtgtaaatacctagaacaacaaatattacgaaacgaaaggagtattgcgcttgtagtaattgtatttctgtattaacaatcatcctcacatgcacttgataaatgtaaattgagtctattatgaaagaggggtactaaaaaacactgacactttcaaaatactctatctttaataaggaaaaaaatcattaaatgatataagactcgcaaattgtcatttcttataaatatcaatcaataaaaaataatatatttaaaagaatcatagctaaagcgaggttccaataaccagataacatagtatgtagaaaaaagaaaaacaaacttcaatttaagtgttggaatatttatattagatttgacgcactttggaatttccattaataaacttccacttcaaaatcaaaacattagtttcaccaattttaacttggttttgtgcagcaagagatacatagaacgacgtgatttcactcgatgatgatgattagctacaactgagtaggttggtcatacagcttaaattaggattattttcgaggaaaaaggggaccaacatttaatcaaatattcctcaagagcctaagtcatcaacgctcaatacttccccctcagttagccactagttatttgtatatgttgaagggcacgcatcaacatgttaagaggtcaacaataacctagaatagtattacccatttcttttattaaaccgtgcagaactatgaacaaacactgtggtaaaagccctaagcgccaaccggagaaggcataacatcagtgtgactagaccaggtggtgaagagacaacaaaaaaaaggaaactaaaacaccaacagaacttccaagaacaaacttcacacaatcatctggtgaagagaatttgcagctgctcataagatcatcatatccaatgcttaacctaaccaaaaaaaaaaggggagatgggagcagaaggggaaaaaagaaaacggggctggggacagaaaaaaagagagcataaaacaaggggataaacttagttgtgacccaccaacaggagaaaaaaaacataatttctttagcacctctcagcaacaagctcatttttcaaacccataatttaagttgtgacaacaaataaaatcaacacaacaaaaactcaactcaatcattacgatgacactgaaaatggctcgatatgcaaataattgtaaagaatgtgatgcaaaaacatcaatgtcagcaggacaacatacagaactacgtaaagcatgggacaagacagacaaaataaaattgaagatcctacacaaatagaagaaccacccgatagtttcacggagaattacctgttgaaatcatttgcattacagcatttacttaagtaaaaactgtaactcagccagttgctcaaatgcaacatgatgaaactcattgcagcaacatccaggttcagttgacctttatatagaagctttacctaaccatgacaatttgttggggggaaaaaagaaaaaaacaaaatgaaaaatgtggggggggggggnnnnnnnnnnnnnnnnnnnnnnnnnnnnnnnnnnnnnnnnaatgcattcgcacataatacaaagctaagcagcctaccatattgctctcaacacttactaaaagaaaaacaaatatgctctaaaccatagagcatcagaatctaaccgcataccttccattacacaagagaaaatcaacccagcataactgtatctcaaagctccaacagatttcaatgagaataacctgcatttgttttggatataacatgcccaccatatcacaaaacatgagtaaacgaaacggagcctatgggtggtcacatcaaataatgatgctttcaactaaacaagatcatactacaaaaattggccacatcaactatagaatctagatatgacagaccaatgaggagataaacttaaatagtcaccgaaagttcagtttaacatattattgctatctaaggtccaataagttttagatgcataaaatcgaacactggctaagagggtttctccctctgaactatcatttttgaagaactagaaaccaataatattcagacaccatcaacaacacctttaacccaagttaattgggaaataatatacttaaaaataaatatcaagaccgaaacatagcaaaaattaccttcaataaaaataatagtatacttaaaataacattccaacatacatcaatcaagcagtaaaagaagcatgatataagcgctgcatggttgatcatgagaaaagcaggactcctcttgaaaacttaaaccacaccaacagctgtgggattctacacctgatctttaccaacccaacctgcaaaagaaataaacaatggaagatgttcataagagaacagagaatattctggggaccaatcaaatagtggaggcatcatcctctgagaattgcggtcctcctaagaagaaacagtatattccttggaaagaacttgtcaggaaacctaaatgagaatcctgaattagaatatgctctttatcccataatcattgacaggtgcagaaatcttcaaccacaaaaaaccatggtgcaatgcttttgaaataaatctacactatggtgacaagaaatggtagtagccttgagtgacaccacgtccgattcaagattgaataacagaaatctacactcatagctatgttctttgatataatttagaaccaccactcctgtaagcacagaaagtaaccaagcattaataatcatataatacaagtggatactctttttttctatattcaagttagtcattaccaagccatgtttgcttaatattttccacttcccactttttccactgatatccatcctgcatcaaagaggattctcagatttgtaacatccaactaaaacataattaacaacaatgattgagaataggacttcccatacctgggttatcatcagctcctgcattttcacttgacccttctgatttgtagttaccattcactgaagtcagtgtcccattatcattcaggattgctgagtcctttgcatttataattggttcctgaaacacatctccaaagagtttagaattttcttcactggtagcattttctccatcattcaaatgatgcttttcttcaacagatccagaatcagatggtgattttccttttgaatcatcctccttgtaatttcctcgtaagggcccactcccatcaaattgttctgattttgatttagatggggttttcttttgaggctctgatttttcacctctatttcgatatttatcactggagtgattcttgccttcaggggactttgtcagttcaaaatttctcttatccaagtttaaattgggtgaagtgcctcctttgtcatgcttatcttctaatgatattgaccttgaacgccttctatcacgatgctttgatttcttatctctattttcccctgatttatctttagaacgacgcttcccttcaacagattttgacctgcaccttttaatatcacgatgttttgacttttcatttttactttcatcctctctgacattagtttgatccctattttctgtagatcttgatctggagtgccttttatcactatgcctcgatcttctatttctgttttcatccaatctctcaggagaatcatgcctatcatccacagattttgacctcgattttttgtgcctggatctactttcatccacttttctttgggatgaccggctccttctgtgaggcttctcatccacagataatgacttggatcgccttctctctctgtgtttagactttccatgcaagactttttcatttttgctagagtgaagcctatcatctgaagatcttgaccttgagcgccttctgtttcttagttttttgtcatcaatctttggagaagacctacttcctctgtgacgatttggagagccagaatcagcacgtgactgtttccttcctctatgaggtgaagtttctctatgatgttttggagaaacagatgatttccttgtataaggacttacactcctacttctgtttcttcttgaagcagatgaacgatgatcaagtgatctatctgaatctcgtcttctgtatctatcactatgttccctaatatctctataggaccgcctttccctatcatagcttgagtaatgatgggacctcaatggtgacctagagcgatgatccttagaatgatgagcaggtgaataagagcgagacctcctccttctccgataactgataggagatcttgactttgatcgaaatcttccacgaggaggagagggcgatctgcgaaaggaaattaaattttagattagacagagaactttgtacagaaaagcagaaaatgataatgagtggtagaaaaaattaaaaaaaaaaaaaacattacaacaagatttttcccaatttaattcaaaataaccacgaatccatgataaacaatagacttgccaattgccaggccacccacaatatatttcttccatgttagacaccagttaattctaaatacaaataatttattcagcccaattcttcttaccttttttagcatctacatgcacatacatagccctaccacatctagctagaaatatagaaacttcatatgattcaaatatttcaaactttctatgttgaaacctataataatccagaacagcaggttgattcagttaagtcatgacaacggcatcaattgaaattcatatacaattataacttctctaatgaaaatctccctttctaaaggatctgcacaaacaaggaaagcagaccaatcaacaaggaattctcccaagtatgtcaattcatactctattattgctgcgtcacccaaatgacctccaatactgcaggagggcacaagtccccataactcagcaactttgcaaagcaaaagtggggaggttcctcaactacaatgtacctactattccttatgcacagagggggctaaataaccacagtccaacaaccccctcctcaacccatgaaccacaactatccagtctgttactgccatgcaaatttaaaaactaaaatgatctaagacaagttgcttttccataccaagcccctgggcaaataatctggaattccatgcaagccgctaagaaaatatgttgattgaaagcatgccattcttgcacatatcacagtttactttatcatctttactagcattaagagggtaaaccttggcacaacggtaatgttgtgtctactgtctaggtgacttgtcggtcatgggttcaaatccggaaatagcctctttacatatgtaagggtaaagctacgtacaatatccttcctccttaccttcacatagcaaggagcctctgggcaatggggtacatagttttatctttattagcattaacattccatatatcattcagatttatgacacatcttattaaagcagagaaactcaattcttatttaattcagtaattggaaaacttttatgctagtgatgatggtgcataaaaagaacatgcactttttttttatcaaaaaccttattttctatcaagacctcattaactaatgtgtagctataaatttgttgatacacacatttgatatttcaagtgtgtttgaataaatatataatcctatataatattgggcctgcgcattgtagaagtggacctgcacaggggccaaacttagattgttcaggtggctgccagctgataggtctgtcaggaccagctggctggtttcacttaggatagttggtagagtgtcacatcagttgcaagtttgacctaattacaactgttctgtaacaacataaaagtattgtatcttccattatcccgaacataataagaaatacagaaacacttctcagttttctctctatttttcgcaccatttgttcaaacattatatgagttcatgtctcctacttcctatttaggacataccagaactacccagaacaaaaatcaaagtggttgaagcaatcaaaaatttgaaataaaatcaggacaataagcatatattatcctctaaacaattgacaacagtaatcaaacctggacttttgctttgtctctttctcttcacttccaactccatcaggatttaatttcttacttatttctgcagctcgggctgctgctaactccgtggcagatttcatggttgcagcccgggtagcagcctgctgtgcagccatagattgttgcataagcagtgcttgctggaattgcatctgttgcatcgcaacagcttgctgcatcatcagaggaagagatgatgaagcaagtgaagaattctcaacagatggtttctgtggaagtgattttgccatttcaacatttaaagggcgccccccaacatctatgttgtttaatgccagagcagcagttgcctcttcagcctttgagtattctatataggcaaaatgctttgaatcagtgattgcacattcaacaacagtgccacagaatccaaagagttgttttagctgttccacagtgagaagagggctaagattgctaacttgaagggttttcttcactgcatcatccttactagccttttcaggtgaacctattgtggtagcaaatacaattagaagaaaaaactaggaaacagtaaaacacaacaacaaaaataacatcacagtcaaatatagtgcaaaattaaggagagagctttcatcatattagaaatttagaattgtgaaatgataaacgtaccactaaaacaaaaacaaaattaagataatagcataccaatggaatcttttgcagactgagcttgcacctgagctgcatgtgcttgaagggcttgagcagcaactattgcctgagctgcagccattgcagcagcagaaggtgccataggagcttggctaagtgttcccattgaggttgtcgcagccaaggcagtcattaacaaattatgaggtgggtgattcaacttgcaatcaacttttgcacaacgcccattaaggtaatcacgacaaacttccccaagtgaggccccaattccaggcaaaatagcaccgccagaagctccagcaacaacccctggaatcattcccaacaatccagggaatgcccctgaaactgacccagagtaattcggcatgttgggcatagtttgattaacaagatttggaaatgaagatgcaggagctaaacccagcggccctccagtactattacctacaaaacaaatcaaagcattggaaattgaccaccacgaagatcattcaaaccaaaatacacgcatatagacagcgacaaggttatcaacacaacactccgcctatgcatagccaatctcaagccaatgtaatgggagagggttatgttaaacctttggcagccaacacaaaactcattgatattagatatactaaacacagatcactcactacaggtaaccatggtgtcattgatccatgtagccaatctcacttggtgggataaggcttttgttattgtttgttttatcactactcataattacatcctagtcaaaccaacttattattatacatataaaaggcaaccaagtgaaactgctaactaaccaaaccaaaaacaactcaaaacaaccacatttgaggcaaatgcatatactaaattaaaaaaaaaaagaaaaaaagaaaaagcaaaaaccgtaaagcatatgtagtacctgctgcactgaaaaacacaggaaatgggctccccatgataggcctcccattacactcaacactgaccatataattccctctcttaggcaccacataagtcacagtatatgttccatcccccatatccttcaccatcccctcttgctcagtccctccaacacccaacccgggagtcaccctcacctttatttgcgcaccaccgccggaaaccttcctctcatcggcgtccttagtcaccaccacaaacgaggacggagcgcacgcggttccgccagcgatcccggtccccgcagcggtgcacttggcgggctccacggggccaatgggcttgtgggccaggtcctcgtactcctcctcggagtcgctgtccgattcagcaacgctccctcctcccttgtcgtgtttattctccaaagccttgaaggtggcctcgaaagccgccttcgccgccgcggccttctccgcctcgctcttcagcttcgcctcctccgcctgcttcatccaaatcggcttcgcagcgcccgaaccgcgatcacccattgaaccctaccttcgaaaaattaccaccaatcgctgatagataaatactagtaaaacctaatttcggggggattttcgataaattagtgcgggaaggaccctttcaataataataatttccaagatttggaagattaaagagagagatacagagaaaaggcgttgaagtgaatggattttgagggcattgaaatgattgttagggggattgacggaggatggagggtagattgggaaagagaaaaaatgggaggtgtattgtacctgttcgttgttgtgacggctaagtttggtgctggagcgttgggcttgggcttgggcttcgccttctaacgtctgatggtatgggaaatggagtcttgcttcctacatcagcactttttctaatacattcaacatatttttttattttcaactttattcttatagaaatcgacaattcgtaagaatcatatgaattgtcaatccatatgatccgtatgagtcatacggattgacaatccatatgaatcatacggattgacaatccgtaagaatcatatgaattgacggattgacaatccgtatgactcatacggatcaacgatccgtaagaaatcgaatggtgtatgttaatatgcaacttacggattttaagaaagacaaaatcgatattacactgtacatgttgggtgtattaaaaaaataactagtgtagaaagttaaactctcaagaatgaataagggaaataagatgtataaggaacatgctttacaacatgttataaataagactcattatattttcagaacccaaaattttaaacacaatgaataattattttttattttttttattttcctattacattacattatgaatcaaatcaatcacttgtctctcatctcttccttcctttcttaagttgtaaacaactcaaaattgcccaataaataaataattattttttataagtggggaaatgttgtaaattaaccctatattacacattaaattgttgattgggaatttaaattataattcatgtattcatataattcttcttctaatttataatttaaattatattatctagtgtgaatttattcatagaaaaatatcaaataagaagttttcttattatgagtaatgagaactacaaatataatataaaccattagattatatttgaacggttgggattaaacaaaaatgcacatgatatttttaaaatagttataagattagaatctaatattttattttgatcatctatatatgggatagttgtgaaatctggtccagtcattgatccagacgagatagtggatcagtaggttagtgggtcagcggtccaactggtgggccagtaattggaaaaattgaaaaaactctgtcgggtcaaaccgattcaaccaaaaaccaagtcggattttaccaggtcaacctgagtcggttccatttccggtccaaacatggaaacgacccaatttggccaccgagttacgatccggaccgtttttacaacactaatgtatggttataaattttaaaaaattatagttattacttctcataataagaaacgtttttactttttcacagttgtgataaaagtcgttgtgtgtgtttattcaagcatttgagatagaaaaagtctcttgtaggtaaaggagacataaaaaggataggtgcatgaaactcctttggatagtttgagaaagttaagaatgaaaaggtgataaagcaatttgaaaattcatcttcactatattgatattttttaaaacatcttagtgccttaattatgtttgtcattgttttagttcttttccatcaaatacgatttttatgtgatgatgtgataatcatgtgacttttcatgtaaattactagtttgatataatagtcatgtgataaaacattgttggtttggaatatttttccataaggcattataatttttttggccatataaaaccaccagcaaaaaagtttgaagaattgaaaaacataaataaaaaagatatgtagtaagcaaacgcagcaaccctcaatacacaatttagtgatccattgaaccatatttaaaacacaaaatcaacaactcacactaagtaaaatcagctaaaataagcaaaatcactaatcattgaatccatgaatcaaaaccctaagctccataactagataatccataatatttgaacccttcaaaccctgattccctaattcacttcttaagcaaacactaaacccttccattttaattttgcttgcacaaaccatttcttgatatagtttacaaaaaaaattacacgtgaatatcacattacttgataacaaggagcaaaaatgttaatagagaaataattcaggaattagaaatgatcaaaagtttgattaaggactacaagcaaaaaattgaaaagtttagaaaccaaaaagatattaaaccctatatatgatttatttaaattgaatgtactttattaaaaaaaaatacataattaaaataccaccagacataaataagagttacatattgatttttatgatatgaaaccaacataagataatatcaaaatgatataaatttatcaacttttatacattatttgaatatacatctgagtttttctattttaaaataagttttataaaatattttttagtaaaaaaataaaaaaaatgtttgatgtagattttattatataagtttggataataaattttgtaataataagtttatatgtaaaatttattatattttaaattttgctactataaagtatgttttatgtataattcattaataatattatatattatattaataattgttttcaagtctatttgttttctttcttttaactacttttaaatatatttatgtaaaactaataataattattgaaaataagcatatttatatatattagtcaaaatttaaaataattcataataatacattttataattattgtataatctaccttttctatttttttcagcctttccattataacgcccgagacttgggagttgtatatcctcatgttgtcattaggccaaccataagattaataatggaccttttatactctatctaacttcatcgcactaacgtgcttgatcacgtgaatcccttgttctcgtgcttgatcacgttattatctaatcatatcttatcatgtttaattagtctttctcggaacaattatataatatatttattaaatataataaatatgccatgtttaataaacacaatatttagtaagattattaatgttatttatattttatatttaataaaaacaacaataaatattatataaggaaattcccattcaaaaatatgtttctataaattagattttttaaacaataacaagaataatatcacacacacacacacatatatatatacatatagataactgttatactaataaatttaaataacagttaaatattatatttaaattccaccactcctgttataaataaaagttcatgctgcattgaataaaagtataatatatttaaatgccattacaaataattatatacaaataaatttaataactgttataactaatactatatgagaaaaaaaatacttacattttaatattataataataacactaaatattatattaattaatatttattcacaagtttaattcatacacacgcataagcacgcgcatgcacatacttacccacgtgtgtttatatagaatacattatttgatcatatatttacatatacaataaaattgacttttgtattaatttagttattaggaatgatttttaatcaattgacccacagttaaaaacaatttcttcatatatatatatatatatgtgtgtgtgtgtgattgtgaaacatgatatactttttaagttattattaagatacatgactattagtattgattattctttaacaaatactattcttataagattcactattactacatgtaggggtggaaacaggccaggccaggccaggcttgattaggcctggccttggcctaatttaaaaatataaagcctggcctagcctttttatctatcataggctttttttttaggcctggcctagcctatttaaaagcctggcttggcctacgagcctattaaaaagcctactttaaaataaatattatatattaaaaaaaatctaatgactatatagtaaaacttcgagaattcgcataatacttttgtaaatttaatataaaaaagacacatattcccttttaatttgtgcgtgaaaaaaaataaaattaattagagcactctaatatgaaattaaaatttactaatcacaacaacccaattaataattataattggaatactttaagtattcaacaaaatattgtaaacaaaataaacaagctgagtaaaataccataagtttaatatataagagttnnnnnnnnnnnnnnnnnnnnnnnnnnnnnnnnnnnnnnnnnnnnnnnnnnnnnnnnnnnnnnnnnnnnnnnnnnnnnnnnnnnnnnnnnnnnnnnnnnnnnnnnnnnnnnnnnnnnnnnnnnnnnnnnnnnnnnnnnnnnnnnnnnnnnnnnnnnnnnnnnnnnnnnnnnnnnnnnnnnnnnnnnnnnnnnnnnnnnnnnnnnnnnnnnnnnnnnnnnnnnnnnnnnnnnnnnnnnnnnnnnnnnnnnnnnnnnnnnnnnnnnnnnnnnnnnnnnnnnnnnnnnnnnnnnnnnnnnnnnnnnnnnnnnnnnnnnnnnnnnnnnnnnnnnnnnnnnnnnnnnnnnnnnnnnnnnnnnnnnnnnnnnnnnnnnnnnnnnnnnnnnnnnnnnnnnnnnnnnnnnnnnnnnnnnnnnnnnnnnnnnnnnnnnnnnnnnnnnnnnnnnnnnnnnnnnnnnnnnnnnnnnnnnnnnnnnnnnnnnnnnnnnnnnnnnnnnnnnnnnnnnnnnnnnnnnnnnnnnnnnnnnnnnnnnnnnnnnnnnnnnnnnnnnnnnnnnnnnnnnnnnnnnnnnnnnnnnnnnnnnnnnnnnnnnnnnnnnnnnnnnnnnnnnnnnnnnnnnnnnnnnnnnnnnnnnnnnnnnnnnnnnnnnnnnnnnnnnnnnnnnnnnnnnnnnnnnnnnnnnnnnnnnnnnnnnnnnnnnnnnnnnnnnnnnnnnnnnnnnnnnnnnnnnnnnnnnnnnnnnnnnnnnnnnnnnnnnnnnnnnnnnnnnnnnnnnnnnnnnnnnnnnnnnnnnnnnnnnnnnnnnnnnnnnnnnnnnnnnnnnnnnnnnnnnnnnnnnnnnnnnnnnnnnnnnnnnnnnnnnnnnnnnnnnnnnnnnnnnnnnnnnnnnnnnnnnnnnnnnnnnnnnnnnnnnnnnnnnnnnnnnnnnnnnnnnnnnnnnnnnnnnnnnnnnnnnnnnnnnnnnnnnnnnnnnnnnnnnnnnnnnnnnnnnnnnnnnnnnnnnnnnnnnnnnnnnnnnnnnnnnnnnnnnnnnnnnnnnnnnnnnnnnnnnnnnnnnnnnnnnnnnnnnnnnnnnnnnnnnnnnnnnnnnnnnnnnnnnnnnnnnnnnnnnnnnnnnnnnnnnnnnnnnnnnnnnnnnnnnnnnnnnnnnnnnnnnnnnnnnnnnnnnnnnnnnnnnnnnnnnnnnnnnnnnnnnnnnnnnnnnnnnnnnnnnnnnnnnnnnnnnnnnnnnnnnnnnnnnnnnnnnnnnnnnnnnnnnnnnnnnnnnnnnnnnnnnnnnnnnnnnnnnnnnnnnnnnnnnnnnnnnnnnnnnnnnnnnnnnnnnnnnnnnnnnnnnnnnnnnnnnnnnnnnnnnnnnnnnnnnnnnnnnnnnnnnnnnnnnnnnnnnnnnnnnnnnnnnnnnnnnnnnnnnnnnnnnnnnnnnnnnnnnnnnnnnnnnnnnnnnnnnnnnnnnnnnnnnnnnnnnnnnnnnnnnnnnnnnnnnnnnnnnnnnnnnnnnnnnnnnnnnnnnnnnnnnnnnnnnnnnnnnnnnnnnnnnnnnnnnnnnnnnnnnnnnnnnnnnnnnnnnnnnnnnnnnnnnnnnnnnnnnnnnnnnnnnnnnnnnnnnnnnnnnnnnnnnnnnnnnnnnnnnnnnnnnnnnnnnnnnnnnnnnnnnnnnnnnnnnnnnnnnnnnnnnnnnnnnnnnnnnnnnnnnnnnnnnnnnnnnnnnnnnnnnnnnnnnnnnnnnnnnnnnnnnnnnnnnnnnnnnnnnnnnnnnnnnnnnnnnnnnnnnnnnnnnnnnnnnnnnnnnnnnnnnnnnnnnnnnnnnnnnnnnnnnnnnnnnnnnnnnnnnnnnnnnnnnnnnnnnnnnnnnnnnnnnnnnnnnnnnnnnnnnnnnnnnnnnnnnnnnnnnnnnnnnnnnnnnnnnnnnnnnnnnnnnnnnnnnnnnnnnnnnnnnnnnnnnnnnnnnnnnnnnnnnnnnnnnnnnnnnnnnnnnnnnnnnnnnnnnnnnnnnnnnnnnnnnnnnnnnnnnnnnnnnnnnnnnnnnnnnnnnnnnnnnnnnnnnnnnnnnnnnnnnnnnnnnnnnnnnnnnnnnnnnnnnnnnnnnnnnnnnnnnnnnnnnnnnnnnnnnnnnnnnnnnnnnnnnnnnnnnnnnnnnnnnnnnnnnnnnnnnnnnnnnnnnnnnnnnnnnnnnnnnnnnnnnnnnnnnnnnnnnnnnnnnnnnnnnnnnnnnnnnnnnnnnnnnnnnnnnnnnnnnnnnnnnnnnnnnnnnnnnnnnnnnnnnnnnnnnnnnnnnnnnnnnnnnnnnnnnnnnnnnnnnnnnnnnnnnnnnnnnnnnnnnnnnnnnnnnnnnnnnnnnnnnnnnnnnnnnnnnnnnnnnnnnnnnnnnnnnnnnnnnnnnnnnnnnnnnnnnnnnnnnnnnnnnnnnnnnnnnnnnnnnnnnnnnnnnnnnnnnnnnnnnnnnnnnnnnnnnnnnnnnnnnnnnnnnnnnnnnnnnnnnnnnnnnnnnnnnnnnnnnnnnnnnnnnnnnnnnnnnnnnnnnnnnnnnnnnnnnnnnnnnnnnnnnnnnnnnnnnnnnnnnnnnnnnnnnnnnnnnnnnnnnnnnnnnnnnnnnnnnnnnnnnnnnnnnnnnnnnnnnnnnnnnnnnnnnnnnnnnnnnnnnnnnnnnnnnnnnnnnnnnnnnnnnnnnnnnnnnnnnnnnnnnnnnnnnnnnnnnnnnnnnnnnnnnnnnnnnnnnnnnnnnnnnnnnnnnnnnnnnnnnnnnnnnnnnnnnnnnnnnnnnnnnnnnnnnnnnnnnnnnnnnnnnnnnnnnnnnnnnnnnnnnnnnnnnnnnnnnnnnnnnnnnnnnnnnnnnnnnnnnnnnnnnnnnnnnnnnnnnnnnnnnnnnnnnnnnnnnnnttttaaaagattgatttatatctttttagttttaatatatatatatatatatacttttatttttttacaaatctattatagtgtttcaaatcttctattttatttttatcttttaagtagattaggttatttagattttttcttttttaaaaagattgatttatatcttttaattatatatatatatatatattaaataggccagcctgataggcctaacaggctttttttaaagtctaagcccggcctttttatttaaataggcttttcaaaaagcctaagcctgacctttataataaacaggccaggccaggccaggccttaaataggccaggccaaaggcccctgataggcggcctggcccatttccatccctaactacatgctactgactctgaataaataaaaaagccacacacaacccagcacaaaatcgtaataactattactaatacaaaaggtctcagaaaacgtgagttgcggagaggcctaatttgaggtaattgtttctgcaacgcatgcgtgacacccatacagttgcgtctcgtgcctccattcgatcccaattccatgatctcttcctccctcacctttgacatcaacaattaaggcttcaattttcatgcacagacaacccttctctttagttttgtgcgagtcatgattttctagccataaagttgtatgtaaggtgcccaataaggtaaatagcataccccttctaatgtttggatgtttctatgtctatatatgcatatttcatgttatacaattcattcaattaattttcttgttaatgcatttgtacgttgaatcaatggcttatagggtcaagggattgaattggacatcttggccctgcaattgttcgtatcatcaaaggatatttttttggatatcatttacatgatagtgacaaatgggggcgtcttctgacaacgtaactgggtttgttttggctgtctcttccagcattttcattggctctagcttcataataaaaaagatgggccttaaaaaggctggtgccacagggaaaagagcaggttcatgtttcctcacatttttgtttttggtttgctaggtgttaattaccctttctttaatcattgatatatatatatatatatatatatatatatattgttttaatttgatcaggtgcgggaggacatgcatacctatatgaaccttggtggtggtttggaatgatctctagtatgtgatttttagttttttcttaaaaattattttggtgctgcaattactaaattataatatatcatgtggcattttacctgctaaacacatttgacaaggcctaatcataagctacctattttaatttaaaagggatttcttgtgacccattgtattgcatgtttgatctaattcatctttaattttctgtttgtatttattgtattacttcatgatataggcttgtgttgaaaaggtgtctcgtttgttgtctttatcagctaatttgacattttacaattaagattataatggagagtgaaaaaagataaagtgatgcagaataatttctatcacatttcaagtctagtggactaccaaaaattcttgaacccaactgatttaagtttaattcttctaagacaaagaatttttttttattacttttaacttttaagttctaatactttgactatgtttccttgactttggattcaaatgtctttgtacatacatataaatttcatagatataaattttgtgctacatataaatttcatagagcaaattttcaattataactcttagaactctgtaactataaataacaacttgctaatgtccccgacaatcttatgaaaatttcatcaactaattctatatgtatgcttacatttttgtagtgattgttggagaagtagccaattttgcagcttatgcatttgctcctgcactacttgtaactcctttgggagctttaagtatcattttcaggtaaggaacatggtattcttcataacattaattattaggatgtttctgctttctttgacacagatgtagatgcacatcttcattcatcaaattttaatttgggtgctgcttgcattttagaaagttacaaactaatatcatgatgcagtgcaatactagctcactttatcttaaaagagaggttgcacatatttggtgtgcttggatgtgctctttgtatggtgggatctacaactattgtgttgcatgctccccatgaaagagttattcactctgttaaggaagtgtggcaacttgctacagaaccaggtaatattcaattcctgattgcttggtttcaacatatcttttaccattgaatcttgcaaaaaatcaaagtaggaggatacaagatgagtgggatgcatattaaggtcttaatagattcaaggcattcatttatggttaacgaagctgacattgagttctttccttcatcaacaggctttctaatctacatgtgtatagttgtggttgtggtttgcatccttattttctattgtgctcctcgatatgggccaacctatctggttatatatgttggaatatgctctctcacaggctcaattacggtatatcgattatgtgttcaatgctcatatgtgtcatgtaggtcacaataaaactaccctcgataaacctaatgttgttccttgttgcataggtcatgagtgtgaaagcagtgtcaatagctatgaagttaacatttgaaggcaacaaccaattcatttactttcagacctggttctttacgattattgtgataggatgttgtcttttgcagattaactacttgaacaaggtaaactttgacttacatatattagtacatttactgttggcagtcattgtaatatgtcttccaaagtacaacttaaaataattatgtcaaagttaaatatatttttaattttttttattggttattggagtgcaaaagttgaaaacactattttgatttttctctgaccttagtgattaggtggtaatttgtaatgcttaagaaatttaactatgcttttgcaatctttgggacttctatcattatctaaatgaccatgtttgcatttctaatctagttcgtggcatttcgaaaagttataaacaaaagattttgtattgtttttcttaattggcattgaactatttcatttcctttcctttgccgttatagatgagtaatacttaacatgcaatattttagaaatggcatgccatattttttacattagggatttccaactaacttacaactgaacttcattttagtattcgctttagactttctttaatagttaaaaccaataatgttagaatcattgaaataagtgtgctgaattagtaatatgcttatcagttatcaattatattgtaatgctattttatttattttggaatcatgtttcnnnnnnnnnnnnnnnnnnnnnnnnnnnnnnnnnnnnnnnnnnnnnnnnnnnnnnnnnnnnnnnnnnnnnnnnnnnnnnnnnnnnnnnnnnnnnnnnnnnnnnnnnnnnnnnnnnnnnnnnnnnnnnnnnnnnnnnnnnnnnnnnnnnnnnnnnnnnnnnnnnnnnnnnnnnnnnnnnnnnnnnnnnnnnnnnnnnnnnnnnnnnnnnnnnnnnnnnnnnnnnnnnnnnnnnnnnnnnnnnnnnnnnnnnnnnnnnnnnnnnnnnnnnnnnnnnnnnnnnnnnnnnnnnnnnnnnnnnnnnnnnnnnnnnnnnnnnnnnnnnnnnnnnnnnnnnnnnnnnnnnnnnnnnnnnnnnnnnnnnnnnnnnnnnnnnnnnnnnnnnnnnnnnnnnnnnnnnnnnnnnnnnnnnnnnnnnnnnnnnnnnnnnnnnnnnnnnnnnnnnnnnnnnnnnnnnnnnnnnnnnnnnnnnnnnnnnnnnnnnnnnnnnnnnnnnnnnnnnnnnnnnnnnnnnnnnnnnnnnnnnnnnnnnnnnnnnnnnnnnnnnnnnnnnnnnnnnnnnnnnnnnnnnnnnnnnnnnnnnnnnnnnnnnnnnnnnnnnnnnnnnnnnnnnnnnnnnnnnnnnnnnnnnnnnnnnnnnnnnnnnnnnnnnnnnnnnnnnnnnnnnnnnnnnnnnnnnnnnnnnnnnnnnnnnnnnnnnnnnnnnnnntatatatatatatatatatatatatatatatatatatacttttgtttaaaatgtacctgatgatgctactaaactatgcaatcatatagtagtttaaaacaataacaacaacaaaagcctgtttccactaggtggaatcagttacatgaatcaaaagatatcattgtgttttgtcaaaaaaccaattcttcaaaaatgctatttaggatctaaatcattttaatatatttttacttggagtttctattagtattcctctacttagttttaactattggcgatcacttatcttatcaactcttcatatagacatatggttgtttatggaaataaaacacaaactacctcttttcttgttgtgcagggaaaagtaaaactgaaatgagaaacatgaaagtgtgagaaacttagtcatccatagtattggaccaatcataacaagaatttaacttgcataataatatcaagttgaatacaagttttgaagaacttggacacctaagatctattaaatcagacaaactgaatttaagattatatcaatgtgtaatttcatattttgttttaaaagcatgcgtgtttgtttgctagtacttaatagctgaaaattctaacacataaagtttattttgtttatttgttattgttctattttattattttaaggaattttttttaagaaaaaacgaaatgacatttaattctcacagtatatttcatggcatgattaacgtctacaattgtcaattgatcaattatcattattgctattgtcttgttagactcatctgtattattatgagtcttaaataatatcttcgtcggaagtttgcaattggattgcaagtcattatctgcttttctgctttatttatttgctacaggaatgggacacacaagatgcatctcaaattgctactgaggtttgtggctttgtcacaattttatctgggacctttcttcttcacaaaaccaaagatatgggaaatagacccatagagtctcctgtttttatgagtactccacaacattctagtagtcactcagggacttaatagccatgcctttttttttaactctggcctggacgacaatgttatttcacctatgttcccaagctaagcagacagctttcaaatccaatgaagattaagctatggtatttcaaggagaagaaggtcagtgaatgagtggtattggatggttctaacaagcttgtaatgtcagaaaaggcaaaacagaaatatgaagcgtaaaagattacaagaagcatttcagacaatattagagaataatgccgcaatttagtttcttgtaatatttttttccctttaacaatttctgagcagcttatttttatgtgaaattgtgaatagctaatactctaaagttagtcttcattaatatgagatcacaatttgcaggtcctattatggtcttcatatacctcaatgttgtcctgattcacgagtaaaagaaaaaaaaatgaaatatttatttgagtgagagtacatgtatatttagatctttaaaaaagaataaagtcaatttaagaatttctcttctagctaggccaaatttaatttgattcaagagtgaaatagaaacttagaaaataatagcaaattactattgagtaagataatttgttactcattttcattatactatgatatagttatgtatgcttatagcaagatcatatactaatagaatctgagctgagataacatagtaattgacagttttcagatatctaatacagcaactatcagataaagagtttaaaattcttaagacactagaaagttctttactcttaacattccgccctcaaattcaagggggacttgagctaaagaaaaaggatcaaccactctaagtttggtgtacaattcacgaaatcgagtactttccaaagctttggtaagaatgcacacaatctgaccaaggcgcaatctttcttcagcacactttctatgacaaaaaggagattgaactccatttgcttagatctcaatgacaggatacgagtcaaggacactatcctaagattgtcgtggtaaacaaacgtagggggttgtaataggaaggtaaagttcatgcagaagagactgtatccaagaatttctaatgtggtgttggccagatttcaattttcagcctatacgtttgagaaagcaacaaaggctgtttgtttgtccaccaagagaccatgtttgggccaaaataaatgtagaacacaaagatgtggaacgatgatcatcttaagcgcaatctgcatcataaaaaccaaaaatgaccagctgaggggagtctgggacttgaaacaagttgcaatattagcccatggtgaagggtccctagcagatataggtttgaccactttccaatgacctagtggtcgagagagaaattgacatattttgttcacaatatagctaatttcaccaaagatggacctatagaggtgagggttttggagaaaatcaggtacaaattgttagagtttgcactttgcagcctttaggcatagggtgaaggtaactttagctgaggacatattagctttgtccaaaaatgtctctaatatatcttccttaagatagaaacatagaatcattttcgagatacatgacatccatacccaagaagcagtccaaagtatcccagtatttgagagcaaatatggagcttagtttggttatatactgttgaatcagatcaggagaatttccagtaattaaaatatgatcatcatacactagaatttatgtgcaatgttggggaagtggttagtataaaaagaaaagatggatcacacttgcatgagttgaatcaagtcctagtaatttagaagcaaagttagtaaacctttaaaaccacgccatgtgtgcctgtttcaggtcatctaatgccttatgtagcttgcatgcaagcagtctcaaagcccagtgcctaagccctatagacttcttcaacaagaaatccatttaggaatgcatcatcaagttgctgaattgtccacttgtcagtgaaaacaagagtgatcatgatcttaatcgtgacaagatttacaacaggtgagaatgtttcagtgtggtcaaaactatgctgttagtggaagccttttgcaacaacatgggccttgtactttttaattgacccaatagggttttctttgacttgaaagatacatttacaacctacaacttgtcagtgaggatgaagaggaaccagggaccaagtctttttaacagtaagtgtagaatattcatcctacatagcctatttgattgaagaaggtttaatgagagtggttaacagcgtgggcttgtgaatgccttacttagaccttgtttgcataggaaggatgttttgacttttgagccccaatggaggaggattagcaacaaatctgagaaagtagaataagatgaaggcatagaaagagatgatgatgtatcttaagataaaggttgaggtggaaaaaaaggctattgtatgtgaaggatgaaaacgagggtgagatgaagtggtgaaaagattgtatgtatgggagaggtaaagagaatgcggatgatggggtagtggtagttgaaaaataaggactgataggaaaattttagattcgctgaatattacatcttttgatatgtagttatgtactatgtagaatttgctatcaagagagacacttacagcctttacgtagtgcaaaataccccagaaaaatgcattcagttgagtgaaaagataatttatgtgcatcatagggcctcatgaatggataacatgcacaacctaagaccctaactaaaatgatagtctggagcagacttgaataacactgtatggtattgcatcgttaagttaggaaaaaggaagatgattcattagacaggtggggtttagaaaagcatgatttcttctacagaggaccaccacacaagcctcttgtaactgctaacactatgcttggatttatgttctgaggtcccaaacctacgtttataaaagaaaaacatattttcatacagatctaattaatggttcatttcatacactaagaaaatattaaattatttctaattaaattaatggcaacaaatctaatctgtcaattcagaaaataactctatatactgatttaaccaaatatttaatttgtcaaggaccagtccatacatctcaggaaataactctactaattctaaccttggataaagtggtgaagcagttaactatggtaagctcaataatgcaaggtgctgtccgtacattttgtgtcgactatgatttagttctttcagtaatcaagttattggaactacattttcttagctattatgtctttaatacttatcgaaccattatgtataattttctctctcagccagatagatatataacgatacacaaaactttaaggcaaagctgaccaagttaagtggcacaactctctttacacaattaagtcataaatcagattcacacagttctacagttcaaattatagtaagtaacaaacaacatttcaatgaagatgaaattggacaaaactattcactttgcaactgtataaatcaattatatgacatgttcttatttacttgtatacaaaaaaaaaacaagcatgtgactgaggaaggcaggcagggatgaacaaaggaaaagaaagaataaatttttcaatctgaaaagataaaaataattaaataaataaataaaagaatttgtggtttgattagacagtgtggagcacgacagtctcaagtgagtccgggacaaaaccaaaaccaaagagcacaccccattcaatgccttcaagaagtccattttccgtagatttcttcctcgtctaatccaagatgaataacacatgcacttgacattattaccatactagctgagcacatgtttagtagcttccattttttcaggcttcaagcctaacttagcctggtctaaaattggcgatacatcacgtgtgcaattcagaagataaagttgtaatcagagattcccaagggttggaaggcttcaactatggccttatcgatattcttagagatgaatccaggaaaggagacaaaaagtgagtccaacttcgcgatggccaataatagccccttcagtgtaaggatagtttgtgcagtccagaaaagctgaaacaaaggcttttcaattggtaaggggtctgatccaacaatgacaagctgcaccatctccaaacaaggcttgacccacaaggctatcaatatgggtgttgggccgcaagatgtgactgcggtgatcttagaacaaacgaaaagcaagctagcaccctagttgttttcggcaaggtctttggccagaagaagcaccgtgccattggcaaagcagccttgttggtacatcatgtaaatgcttgacggagggacgaaggccttgtagtttggtgagctggtaatcaacatttcctttactaaatccaaattcttttgagttccaaaacatctcaagtcttcaatctacaagctccatatcaccaacgtgttggtggctataacaatggtatggcaataatcatctgatgtggttgagaagattgtgttagttgtagtgaatatcttgatgtatattaaaattttaaaatatttaaaatttttatttggtaaatcttatataaattttataattagatgaggttttaatttgaattttaaatattttaatattaacttttaattttaatctaactgataatttgatgataaattggtgtagtagattaaaaaatcttcaatccaattgatccaactctaccaaaccttgcttttccctctctatcttttaataatattggtgactttttaatatttcatttatcttttaaataacttctaaaatattttttgtttaaaaattaaaaaaattctatccaattacttaattaaatcaatctaatttttttggaccgattaattttgaaatatctaattgatttaaatctattttttttgtcaattttgagattttcaaataaaaataggtgatgtaaatataatgtaattagcatacaatataatgtaaatataatgtaaacatcatatgttaatttgaaataaaataattggtttaaatataatttacataaaaataggtgatgtaaatataattgataaaagttacattatatttcaacaagttccatatacctagttagcatacatgattttgataatatataaatataattcaacggttggatcaataaaaatcatattctatatcaagttataaatataatatgataattgtcaaaattacatcaatataatttgatttctcattattataaatatatttaaaaaaaactagtttgtaaatagcattttggaaaagagctgaaattgtaattaactttcaaaataaaagatgtttttaatagatataattacataaaagtggttttatacaaatatttttttgtatacaatcttagagtcccttcttctaaaagtttaaaccattgaattcttagatgggacatacatggtgatacaagtggttgatgagatgtgttctgtgaaagtgatttttgaaatgattgcaaatcagtgcatgggataagactaaccaaagaataaaaactaaaaaggtattttcatgactttattgatgactacaataaagtagcaataccttgaatgaatgtggtcttattcacacaaagcatacccataacagagtagtggattgtagagaaaaattaacattcacttttcatgacatgggttggatatatgagttaatctcatgaattttgatgtacagttcttgaccaacatttagtatatcatgtaattcattctttaaataaataaaaaaattattttctcaaataattttttaatatgtgctcaataagaatcaaactaacaaaattcaaatattaacaaaatggaagaaactaagaaacaattaatttaaaatcattaatgtatcatcaaaacattctctttgcatatgataagaatgcatacaatatctctctcttatatgtgtataaagtggagcttatggacaatgggttatgtaatttttttaatgtatcaaggtaattgtccaatctcaaaatagaagataaaactcaatcataatagaaaaaaaaatcacaaaaaagaaacaagaacattcaaatcgaaaaggaaaaagaaagatatatgaatcctcctcaatctctatccttgtgttgttgcttcttcctcaattttccttaattatggattctttgaaataaattgtgaaagtctattttaactcaggatctaaaagggactaagcccataacaattaaaacacagaaaataaaccgaaatagagtgtaactttattagaaaaaatgagaaggagaagtaggggtgaaaatagatcagattagacttgcttagacatgatttaaatacataaacctgacttgacttatttacttgttataggtttctttagactttgtctgacgtatttaaaagtctagttctaatcttttttactttcccttcttttcttttctttttcattttatcatctttctttccttttttttctttttctattatcttcctttnnnnnnnnnnnnnnnnnnnnnnnnnnnnnnnnnnnnnnnnnnnnnnnnnnnnnnnnnnnnnnnnnnnnnnnnnnnnnnnnnnnnnnnnnnnnnnnnnnnnnnnnnnnnnnnnnnnnnnnnnnnnnnnnnnnnnnnnnnnnnnnnnnnnnnnnnnnnnnnnnnnnnnnnnnnnnnnnnnnnnnnnnnnnnnnnnnnnnnnnnnnnnnnnnnnnnnnnnnnnnnnnnnnnnnnnnnnnnnnnnnnnnnnnnnnnnnnnnnnnnnnnnnnnnnnnnnnnnnnnnnnnnnnnnnnnnnnnnnnnnnnnnnnnnnnnnnnnnnnnnnnnnnnnnnnnnnnnnnnnnnnnnnnnnnnnnnnnnnnnnnnnnnnnnnnnnnnnnnnnnnnnnnnnnnnnnnnnnnnnnnnnnnnnnnnnnnnnnnnnnnnnnnnnnnnnnnnnnnnnnnnnnnnnnnnnnnnnnnnnnnnnnnnnnnnnnnnnnnnnnnnataatattgcaaaagccaaatggtgggtgtttttggattggatttttagtatggacatctgctatctgttttcattttttatttttagtcaatcttattcaaatagactatgatcattatgaattggatcaaactagttttaaggagaaaatttatttgaattggatcaatctaaaattatagttttactttctttataaatatatattgaatataataaatgaattgattttcaaaataaactctgaaatctaatccaatctaataaataattttgctttctttatttttttctgttttaatttgattagattgaactgctttatgaatattctatgaaaatgtcccannnnnnnnnnatgtagaatgtttaataaggttttctattttggaaagcttcaatcaagccctttatttttttaaatgccataacacgattctttagttttttttttaaaattttttaatgtgattctttctgttcaatttaacatgaaggcattacgtgaaaattttaatagttttaatcaaattaaattataaaaaaccgccactttatttatttatttattatttatataagtaaatttattaagataaacctttttgttatctttggataagcaatttgaatgacaaaaaaaattaaattttcaactgaatatcaatttatctagttgcatattaaattcaaaaaagttttaaaatgataagattttcataggaaatattttcaaattcaaaaagagaagataaattatttatctattatatcaatagacgttggctcctaaaaacactaattaaatgaaatgcgacttggcggcaaattttcaaagaaaccagcgtaagggctctgaataagaagcccgtgtttacgaaaagaaatgccattgacttgagagtttgaagctgataaaagtaaaaaacaatgtctgggtttcctcagcaacataataacgatgggagtaatgatgaggtttatgaatacactcagttctttgatttcgacaccgagccgtggcagaacctcgatgatgcgtggtggacgccgaacgttgctacccaggttcctctgacggaggacacccaacaccaccaggaatcgccgaacgttgctacccaggttcctctgacggaggacacccaacaccaccaggaatcgccgaacgttgctacccaggttcctctggcggaggacacccaacaccaccagaaatcgctgaacgttgctacccaggttcctctggtggaggacacccaacaccaccagaaatcgctgaacgttgctacccaggttcctctggtggaggacacccaacaccaccagaaatcgctgaacgttgctacccaggttcctctggcggaggacacccagcaccatcacacattggcccaccacgtgaaccagtttgtgtcggctccggtcgagttgcccagccacccagttgaggcgctggtgcataacggtggtggtggttccatgatgcagaatgatgcaggttcatcggttcggcgcaagagagggagaggggaggcatggactgaagaagaacacaggtagacttttaacgttgttgtaatttttggataatattgcaaaagccaaatggtgggtgtttttggattggatttttagtatggacatctgctnnnnnnnnnnaataataataataataataataataataataataataataataataataataataatatcatagtgaaagttattattgttcgtgattttaagtatatcttttcttcatttacttagtgattcttatttttaaataaaaaaaaaacagtgtcaatttttagtcatcacatattaacttaactgttttaaaatttaaaacattgacaaacactaacatttttaacgaaaaattaaaaaaatatatttttaaaacataaaacaccataatgaaattttaaaaacataatatataaaagtgaaataattattaaacataatatactaaaaatcactttaaactaatttaaaaattcatggtctcaaagtggggcttttagtatgcataattgttctcaaataagaatacatggtctcaaagtaaagctcccacgaacaacaatttgatcggaaattggagagttggtataattttattattttatcatgttaccatgatgtaagtctactttcagaagaaattgtgaacatcaatgaatcattttttcctgtaagtttaaagtattgtatccctgaactttttctctcatctaacttctccaaaaattaaaattaaggtgtataaattcactttannnnnnnnnnataatattgcaaaagccaaatggtgggtgtttttggattggatttttagtatggacatctgctatctgttttcattttttatttttagtcaatcttattcaaatagactatgatcattatgaattggatcaaactagttttaaggagaaaatttatttgaattggatcaatctaaaattatagttttactttctttataaatatatattgaatataataaatgaattgattttcaaaataaactctgaaatctaatccaatctaataaataattttgctttctttatttttttctgttttaatttgattagattgaactgctttatgaatattctatgaaaatgtcccacattgtctacttgagcatattgttttcattggttatatatcaacttttttttaacgattcgtagttttcactagcctccaattggatcataagtgttctcagtattgaagaatacaaatattacattgtttggatttttaatattttatttttctgttatatgttgtattctcaatttgctgttacttttcaactaattctggtgaaatgtttagacgtgcacagaacaaattttgttcctaataaatttatagagaaagaccaaaatcccttgtgaaaaatcttgcttatcaaacatttggattgtattattttaatgtattttatagaactcaaatgaactaaaacttatcaaattttcatctcatatttgttttttaatggtaggttgtttttacttgggcttcaaacatataagaagggagcatggacaaaaatttcaaggcatgttgttaaaacaaaatcttcaactcaaattgccagtcatgctcaaaaatacttcaatcgtcaaaatgcctcatcgtcaacaaaaacaagaaaaagcattcatgacataaccttagatgacacaaatagcgctcctcatcacattgatccacataattcaattcctcatccagatcaagacattcaacaagttcacgaaatgcaacaaatgttgccgctgaatccaccaaacagcatgcctcatcaaatgagtggatttgaatattctgatattgccaaccaacatgttcacgaaatacatcaaatgttgcggctgaatccaccaaacaacatgattcatcaaacaaggggatttgaaaattctaatattgcatatcaacaaattcatgtaatgcaacaaatgccactgaatccaccaaatagcatgactcatcaaatgagtggatttgattctgatattgcatatcaacaagttcatgaaatgcaacaaatattactagtgaatccatcaaacagcatgactcatcaaatgagtggagtgaatccatcaaacaacatgactcatcaaatgagtggatttgaaaattctgatattgcatatcaacaaattcatgaaatgcaacaaatgccgctgaatccaccaaatagcatgactcatcaaatgaggggatttgattctgatattgcatatcaacaagttcatgaaatgcaacaaatattaccagtgaatccatcaaacaacatgactcatcaaatgagtggagtgaatccatcaaacaacatcatgactcatcaaatgagtggagtgaatccatcaaacaacatgactcatcaaatgagtggacgcggatattttcacccctaaattgtgattaattctttactcttagcatatattgtggtctgtcctaaggtgtagcagtagtgaacttataaagtaattagggattttgataattgcattattggtgcaaattatatttatattcatttgtcattttaggatgtgagatgcgaataaatataaattatctttatatgcattttttttagtttgatataatttgagtttctttaattcaactaagtaatattattgccatagattttatgaaaatgtgtatgacttttctttgaaaaataaataatatgtttcttttatctcttaatctgcaacttgatctgatttaaaattattcttggacttgtgggatttagtagtaagtagagcaattatattcggtgtcattgcgtttagatgctaatgctctattagagatattgcttgacataatacaaagttgttttgccaccattctatttttggaatttcatcatggatatgattctttaatggtagtagagattgtggtctgttttaatgtgcaagagtcatgaattttctttcttgaggtcatgatgtatagtttgagcttgtgtatccaaatgactggttcatttttcttgtttttagagccagcattttgaagtgggataaacattcaaagatgtgagatctcatgactttgataacgtttagtaataatgttacaattcatttcattcttaaaaggaaagataaacttctattttttataataaattttaaagatcgacttaaatatattttagttcctaaaaattaaaattaatttttggactttatatttagtttctaataaaaaagttcttgacttctggtcctcaattgtatatatagataaattgtctgtaagcttaattgaattaataataatatgatacgttcttatttactgatataaaaaagaagcatgaggaaagaaagaatacattttttaaactctaacaagaaagaaagtaaggatttgtggttggtctttctaaatacaatatatatgattagacaatgacacaaagagcacaacagtctcaatagtgcgtccagggccaaaaccaaatagcataccccgttcaagaccttcaacagttgtgccaagtccattttctatggagttgttactcatctgatccaagatgaatagcacacatgcacttgacatattaccatattcagcacatgtctagtagcttttcaggtcgacaccgctggtggtgcaaaagatgagatgggtaatcttggacttgggttgaccccattccttgattgccttagttgcagtctctcttcccaactttggtacctccacaaccaccgtgtcttgccttgcatccaatgaaggtgccatataagcacaaacactcggattctccatcaggatctcttggtttaattacatgcatcgcttcttaatcattgacttatcatgtattattagtatgtattactaatcaaatcaaagatgtatgttgaaaataaacaatatacatattatataatgaaataaagataggctaaatgagagagagatataccttacacatgcgcttgaacttttcttttgagttcggtcatgtgtgctcactgttggtgatgcggaaataatagtcaggataggtactctgatcgacgcagttgggaggagtggcggtgccaatagtcatgacagtggcagggccttcaacactcaccaaccaaatgaattggaaagggaaggtacattaaggtagatgcagggcatgcttccttcctctgactgggcttgtggtgtgcacccaccgcatgtctaagtagactgctgactctccccttatagttatacttataccaacccattttttctgtttttttctttcctaatgatcagcaaataactgtttttttttttttttctttctccgtacgtctttgcaattgctagtcataattttggaattacttttctattgctgctttttaaaaagagtttttagaaaaataattattttcaatcacggtgttgtttttcgtttcccctttagtttattatgttataaattatttttgctttcacaattaagttttgaaaattttatttttgtcttttatgtttttgaaatgtatcattttgatttttttttcaatttttcgttagaaatgttagtatttcgataatttttaaatttaaaaggatcaaaatgatacattaaaaaacataaaggacaagaatgaaattttaaaattgtgtcaaagtaaaacaattataaaatataatgaatcaaaagtagcattaaacattttaagataattaattttacactatggaggctaaaaattgccacggtctttgttttattcttaaaaaacaaataactaaaaaaattatcatcttcttcaacctcttctagatctaaaaaggtaaaaaaaaaagtgcagcatcacatatatggaatgacgtcaacacataatcttgttagaaccaccgaaaatttgtatactcctcactagaaaccaaacctttcacacaattatgctataggaaacataagcaaggtagatcggagcaagagttctcttcggcgaaagacaaaaacatggtcctaactccccaattaatccatatttgaatgaggaagtcaccatgtggttctttgtgagatctgcgagcaaaacctccactattgtacacgtttgagttggacaagtagaggatttctcagttgacatctacaatcgggttgagcgaagacaagtagcacaaagagggcccaaacggtgtatttttttggaagatgattatatctaacttgactgatcaaacctcatctacaactggatgttgtcagtattcttcttcgccttcatcaacgcgctactgccatcatggtaatgagcagttgttgttaggtgaggcaaaaatttcagttgtataaggaggttgcaatggagacaaaagtgagggcaagacaacagtctttatgcgttgacgtgaaaggtggatcgacaaaagaaaaatggacccttacccattgtgattgagaataattagtgaatgtaattattatcgttattaagtaattaaattgaataaagatgatgatgataacaacaacaacaacaacaacaacaacaacaacaacaacaacaacaacaacaacaacaacaacaacaacaacaacaacaataataataataataataataataataataataataataataataataataataataatatcatagtgaaagttattattgttcgtgattttaagtatatcttttcttcatttacttagtgattcttatttttaaataaaaaaaaaacagtgtcaatttttagtcatcacatattaacttaactgttttaaaatttaaaacattgacaaacactaacatttttaacgaaaaattaaaaaaatatatttttaaaacataaaacaccataatgaaattttaaaaacataatatataaaagtgaaataattattaaacataatatactaaaaatcactttaaactaatttaaaaattcatggtctcaaagtggggcttttagtatgcataattgttctcaaataagaatacatggtctcaaagtaaagctcccacgaacaacaatttgatcggaaattggagagttggtataattttattattttatcatgttaccatgatgtaagtctactttcagaagaaattgtgaacatcaatgaatcattttttcctgtaagtttaaagtattgtatccctgaactttttctctcatctaacttctccaaaaattaaaattaaggtgtataaattcactttaacttagttgaaagtcgactcattctacttccttattttcttcaccaataaattcttgttaagaaattttatccaaacttaattggaatatgtggaccaactttatcattaggcaacaacatttgataattacaaatcaatatagggataaacatggttgcaagtgaaagacaatgtaaatagttgaacctagttactgtaaatgttatggctcgtggttaaacaacaaagaatatgaaactctagtaaacagaactgaaagttgtgaatgggcattgcttgcgaatactcacccccattatctttatcttcacattggtatgggtaccaacaggtgggtatacaggaatatttctgttacggcatgagatgtgtgtataccaattattaatattgaataaaataaacatttatcaaaacatgaaaagaaaagaaaagtataaaaattctggtaaaattatgaatcaacttcattcatatgtcctactataatcttgtaatcaaatatgaagaagatccagtaactaaagatacacagcagaacatgccagagtataggtgagctttgtaagaataaaaatgtgaggaaaaaggataattaaatttaaatgtatatctaaatacatctctcaatttctttaccccataagaacctctttaaattttcattttaccaaacgcacagtaacacatctgacatgtgcataagggttaaaacaaggcaaggattaacttatagcagaatatttggaaagaatataggacatgaacttagctaaagtatagcaggaaacaataacaaagggtgaataagcctagatgtcatctgttgtttcattagcattacaatgaattgaattgcacattaaagaaccaacagaaaattactccttgaatatttttttcataggcttcagataatagatggtttgaatagaagcattaaagcatgtattggacaaaaaatgtggcctttacactcgcagcttctgagtttcatagttcagtacagacgaacacaaggaacaaaaagcattatttatatcgattagttacactaaaatattataaactaaacatagtatacaacaatacctaactgaagaaataccaattaagaatgcattcaacaattatatgcacttttcgccacttcttgtaacagaaatgttcctggactccccagcacagataaacaaaatggcagagatacatcatccatcaacaatgaattgatcttcttgattatctccctcaaccctagcgtcactgtgaacattcacatgatgcaaattttgcatcatttgtgaaagataatggttgctagcactagtatgatcagataggccagcaggttgggcaggccactgcgagaatataccaagcaattggttagtaagattttgttgctcgtgaagaaaacgagtctgcatctggcccatttctgctcggtgctggctcagcatctcgtcaaccctcttcttccattccagcctcctgcagttcattctctcctcccattccctctcatgaatcaactcttcctctctccttttcctttccatatctccgttttccttttccatggcttcccactccgccatcccctgcctcctaagcttgtccctctccttctccctctcttctctctccttttccctctcttcaagcttcctttcccactgcttatcaagctccactcgcaaattctccctcctctgcctctcgcgctccctctccacctcgcgctgctcgaaccgcgtctccatctctctcaactgccccagttggttagcaagaattcgccacgccttcttctccatccccttcaccaccttcctcttcttcttcaaacttgaccccgtcacctccccttcctcctcaaacacaaaaccattctccgcagcatcctccctctcccgaacaccactcccattgtaattcacctccccttcctccccctcaatctcaaattccaaccccatcacctcattgtccaccccatccaaagcagccccaaaatccccatccccagaatgacccatctgcccaaactcaaccatatccatccccccacaaccagcaagaaacccatccccattatccccatcacgatccccgtgatccccatcctcaatccccatcaactcattcccaccatgaccaccaacaacaagtgcaacatccccaaacacatccttatacctaaggaagttagaccaatgagtaagcccctccacccaatcaaactcactcccctcatcacaatcccctcctcctccggaccccgaaaactcaggcctcttgatcttctgcttcacaagcaaatactggtgccgcatgttctgcaccttcgtcgaaacgtccttccaactccactgccaagggtacgcaatgggatcgcgcacgtggtgcaccgaattcacgtgacaagcaatcggcttgaacttcttctcccgagtccgcatcttcgccagcgaaccgtccgccaccatctccccgtacttgtcgattagggttttctcctccgcctcggtccatttcttccgcctgggaggaatcatcggtaaccaataatctctacgccgacgctctcgcgatgtttttcctcttcttcttcctcctcgtctttttcttcctccgcgagcaccaaaaccttttccgatagcgattctgattgcatcgagaacgcgaagatcgtgcaggttgtttcaatttttatttttatttttatttttttgctttttcaatccacgattttaaccaagcgattaaccaatcgaatgattctctccgaaactgtaaaaataaggaaaaagaagaaggatggagcttgcttaccttttcggagggagaggaggagcggagtgattttcccggaaagtgaaattttctcaagaaaataatatcgaaataataagtcactggggaacgaatgaagtgacgaggagctgactaagggatcgacaaccgtgttcgattcccttgcaaaatttcaaagctgagactgaaaatttcccgaccaattttattttccagaataatagcaaatttttcagatgatttttgtttttgggtttgtatatctgtaatttataataattataaaatatgaaaagttttgttcagtcttgtgtacatgccggagtggttatcgggcatgactagaaatcatgtgggctctgcccgcgcaggttcgaatcctgctgttcacgcttttagctattctattttctgttactttgcaacgagatttcttgcatcctctaatgctagcngcatgactagaaatcatgtgggctctgcccgcgcaggttcgaatcctgctgttcacgcttttagctattctattttctgttactttgcaacgagatttcttgcatcctctaatgctagctagttttacgtaattacaactttgtaaagtttgtactacttatttttttttttttacttatgtaggagttggatttgatcaaatagtatttcacacttgcatattgttttattttttctaggagtaaggtattttatagtagaagtgattttgtttctcttaatatttttttttcatatacataattacaaaatcaaatttttgttaacatgttatgtttgaaaaattcaatcatctatcaattatgttaattttatcgattcattgtgttgatccttaacaccttatttatcaaattatttaaaaactcaatctaaaaaggatttatcttataatttgaaagtaaaagtgcaccactttatttaacactgttaactcaaacagtgggtttgcaggtgaaattcctagtatatttttaacatgtatccttatgcataatgccaaaaccttatacataaggatacaattaaaattgtgtatagtgtgttgtgtaggtgtttggcaattgtgtaaaatttcataattctactgttatggtctttgatcattggttatgaaagtagttcctttagataagagatttattagtaacgacaaagtaagaattattgaagaacgtaatgttacttattatgtctacataatatttttcttagatataaataatttaatgttttggaagtataattgtaaaatttagtttgatcattgacccagtcgagataatggattactggtccaaccgatggatcagtaattgactcgatttgacttaataaatattaaaaatctaaaattatatatgtatctattatatataaatatataactaatattatttgagtaagaaaagttcattcatattctaaaatccaaaataataattgataataataaaacatcaaaaaaacattgtagagatggttcattttttttaaaccagatggaatggaccagttcaacctggatttggtgacctaacctatcagatttgaccgggtcattacgggtcaattgcgtaattggtccaataataaaattggtctgattaggccaccaaagcagaattgaatcaatccaatataaatgtaagaattcagccctagttcatcaaaatatgaactatgcatattctaactctggtttttgctttcaatttcttacattttccttttttcagcagtagtataaaatattaaccagtttcattagtccattcttttattgcagcttattagaatttggatttaggatcaaattccacccaacaaaattgacttaaagacgaggattgtccaaattttataaacattaatttagccttatttttagtcaatgtaggactatatgtctatatctacccgtcacacctatcagaataaagatgcatgagacagcaaattaaggcaggccaagggtgtccgcaattaaggcaacacagttgttaaatgattttctttatttgtatgctcgttcattagtgaattgatgacaaaggattatccaatgtgttaacattaatattaacagcatattcctttccatctgtatgctttgtgacttttataactattttcttctacttcttttaacttactctcctatcaaacaattgagggataaagattactgatgatacatatattcttatttgaaacaatgttacagaattgtggcgcttttcttgagaaggatggagcagggattagaggtaaaataaagatcacaggattcgaaaatggagatatagatctttcaaaatcattatggacctatcaggtccataatatttaaaccctaaactgatccaaaagaacaatatgaaatattagctggtttttagaggaaaatactatttgatgtagtacactacagatgtattctgtaaatctgtacagttagtaaatatacagtaaatacaccggcccaagacacatgttttctctttctctggttttctacatggtaccttctggaatctggacatattacaattggtcttctgaattcaaatgaccaactagcaaacattttctagggtgagtcaattagttagtccatagatagtgtaagtactaggtgtacataagctatttaggtatactccagaagcactctctttgtaaataaaccggtatagttagtataaatattgtaaggactgaagccaaacatttgtgtatttccattcaataggttcactctcttattctctccagtgtgtgtgtgtgctctgtgatatggatactcatttctgttattttggctctttaacctttaaaataattagggtcagcaacaaaggacacatttcaatttttttgtattaaaaaataaaccacttttgtcaaagtaaataagaactgcaaaaggatgagtgcagtaattattgattatatgtaatccaatcagggcttgattttgagctatttgggaattcatgctttagagatgttttggtcttagtgtcttacaatatccgtaagcaaatgagaaaggaatttttttctcaatgtgcttgagtgttttttccaccaagcagattggacttatttatattcaagagtattccaaagataagcaacgcccaaacaatttaccagagaaccatgaagataccactacttcctaagatgcattaaacctagctataccagaaaaattctgatggcaggcagataaagttgagggaaaagttctgacagtgggcagaaaagtcatcggaaattatgacaattactggaaattttgctggagaattctagaatttttggacgtctgacagcttcaagagcccaatcagaccttctacagagaccattttttttgcagaaacaccccctctccccagattaggatctttaataccatgtgagaaaatggggggcaaaaaatctcaatgtacttgagtgtgttttctttccagaagaatgagcttatttatgttcaagagtattacaaagataattaattctaaaataatttagaagagaatagttaagataccactaccttttttttaaaggagatgccactacttcctaagatgcattgaacctacctataccaagtacctaggctacttgctaaaataaacattaaaagagctcttatctcctaaaatattcctaattccaacaatatcttaccgtagtataaattggattgagattctatgttcctgtataaaataggcttttgaatcttaagtttgggttacatgcccttgtaggaataggttgtttaagttgcctatttgagatttttttgtctttaaggatttcaaccttgccatggtaattaaaagatataaatttggaaaaagtattcttagttttgattatttgttcaatgtcagttggtctttctagttctgccttcactccaaagaaacttaaaatgctgctttaatggcatgttttcttggtgtgtctcaccttcattatctttattctaaatttgtactgttctataattttcatcttcatatcatcactttctatacttgtgagattgtacttttcatagtccgaggaatttgaaaaatactaactccactttattcatttgtatcccaggttgggctttagggtgagttttttaaatttttcagtgaagagaatgaaaattctgaatgggtagagttggcccctgatgccatcccatccacatttacatggtacaaggtaactttgagctgttgaagtgatatatctataagaactgttgtacagtgaaagaaaatagaaaaggaaaagagcctataagttatttacgttgattagttataaatataaaatcactcatgaacctccataagagcttaagcttcttagaaagttgattcttgacatggtattagtttcccccatgaccaaggcagaagtttgatactagttgcactctttttttctagataaagctagatttaagcatgccagaatatctgcaaaatatttataaaacgagaatcatgcataatgattaggataattcatgttataccaataattgtgtcacctaatttttaggagtcttagcttgttaggaatcttactttattcttagagattttatcgtttctttagtaagttatagttttgttatttacttagatttggaatctagtattagtattaataggactatttggttagcattttgtttcatgtcaaaataaatgataatattatttaaagtcttttttttctctcacttatcatatttctctaacaaaatgctcatttcaacaaagcacgaggtaaaatggccatccattgtccatgcttcaagtccaaggtgtcaagaaattttgaattcttggtttctttgattctgttctcatccatatatagtacaggtttcatttacatccgttagtgacacaaaaattctaattccaaatttgtacaacctaaattaggaagtctaattgtgtacaaagtacaatgaatgacctggttcgtattcctaatatatacaggaaacaataataatgactagttcccttattgacatccccgctcaaattgatgtggctggtcaggaagcatcaatttgcagataactgatgacgtggatgaggaacagccttgataaagatatccataagctgaagttgctaggtgacaagaggataggagataacttgattctccaatgcctcctgaatagccgaatagaatgacaatccatctaaatatgtgctcatgaaaaactagattagtagcaatttgtattacactagtattgtcggcatagaaatgtgttgcagctgtttgagacaatccaagctcagccaaaagcccacctatccaaataatttcagaacaagctgtagatatagctcaatactcagattgattgagtggaggaattagagacatgagactgctttttacttatccatgaaattaacacaggatcaagaaacatgcaccatttatgtttaagctacaaaatatttcctacagtagacaaattcatgaataatataaagtgtacggtcaatgaagaagatgattataaatttatacgcatgctgaagttctttaaggaaagcagatgatttggaatgaatattttatatatgcccaggacatttgtttgttctgtgttgcctctgaaattgttcaattatctatttattgtaattattatccccaacgcacaactacggagtgagtgaatctaaaatcatgatacactactgagattttatgaaggtgctattaagcccactggtcattctttcccaatgctatttttcttttttattcgaattcagaaacaacttctttgtatatgcaaggataagactgcgtacaatatctctttcccttaccttcatgtagtaggagcatccggataatgagttacatagttttttttatcacaacacaacaatttaaaaataacacctatttattttaagcagacatactttgatgtccctggtggcagagattcggttgctcttgacttgaaaagcatgggaaaaggtcaggcttgggtgaatggtcaacatataggaagatactggactcgggtttccccaaaaagtggatgtcaacaagtctgtgattatcgtggagcatataattccgacaagtgttcaacaaattgtggaaaaccaacccaaaccttgtatgtagtctcaaagtagctaaaactgttggtttcatgatttcatatgactccaaacgactttatcgattaattatgaaatgtcgctcaaagcatcatttgtctcctgttgatttacacctttatgtacaacattttacaagaaaaacttaaattctcctaaccaatcctaataattactaaattaggaaaatattgaattttttaatattccaattatattaaatacatcagctttttaatttaaaactttccttgtaaagtattgaaagaattattgtaaagatattttaggagaatacagcatcacttattgtactatcatacttatcattgcactttccttaacttctgagttattggtcaatctccaggttccatgcgccatgatcatggttgaaagcaaccaacaatttacttactatcttggaggaaactggaggaaatccctttgaaatttcagtcaagttacattcatccagaataatatgtgctcaagtgtcagaatccaactatccacctttgcaaaaagttggagaatgcagatctcattgaagaagtttctgcaaataatatgatacctgaactgcacttgcattgtcaagaaggacacacaatttcttccgtaacatttgctagctttggtactccaggaggtagttgtcagaatttttctagaggaaactgccatgtacctagttcaatgtccacagtttctgaggtaaactctatattgggtagcttttcactcttcactatattaccttgggggggaattggggacacagttctctgcaagaaagcaaaagctcctcatgattttgctgcaagaaagcaaaagctcctcatgattttggcattgtggacttcgataaaagtgatgatgcaagatattttccaaaatgcttaaccctatactttgtttaagtattacgattacaaatttattgttatcactgattaaacatttctgtaggcactagaaaagtgatgagaacttgtatgttaagtgtaaggtcttggctaatgttgatatgcagcttggaaaaaacagggctgtagtgttatgcgtctttttagctgcaggcttgtaatgttttgatgaaaaatattctgcggttcaccaaaagaagaaaaggggggaactcgcctaataagaatggcccaatacataaaactgaagcaaagaacttacctgtcattcaattttatgaatataatgattacaaatcccctttacaattcatctttagaaagttggttttgggtccaaaataactttctaaactttgggttgattatatttattgaggaatgaaatgattcatcggtcagcgtggagatactccatactaatacatgtctgtatcaggcaaaacacttgtgcgcatggttgacaaaacctaacttttctaggttgtagaccctcttgatatatactttctatattttgcaggcttgccaagggaaaagaaattgctccatcaaaatatcaggctctgtattcggtggtgacccctttccaggtgttgtgaaaacgttgtctgtggaggcaagatgcacaacaccattgagtgatggtttctttcaagaggctgtaagcagcttctaaaacgagaggttcacactagtcaaccaactggacaatgttactgaccacaaatggtccttaattgtgttcaccctattgtgtatatgtatgacacttcgctggatgtcatgatttagtacataatacttggtcttttgactttggacagcaaataaataatctctgctgatcaatgattctcctttgtgcatgcgataccatgggttctttgatctaaaatccaataaatcatacacgatttataattgttattaacgtaactttttaagtaattattataaaattcaataaatcatacatgatttataattaaacgatagtgaaaatattttaaactataaatagactatttactctaaaaataaacagttatatttcatcaactttttaagtacttccaacataatgcttcataaaacgaaaaatattagaactaattttaaaaaatcatcaggacggcaactcttcactccacaccaaaacaggttttccaatagttgtcagaaagcaatttcctagagttgcaaatatttataatactaattttgttcatatacagggacaagcttttaaactattttcaggaaggataaatttagatcttcccttcaagatctttctacaaatcattctatttactaaatacaaaagaattaaatgcattttatatttccaaaacattaaatgcattcactattttacttaatacttagtactttataaagtattaaaaagattagtaagatgaagaaaatagcattagtcttccaagaattgtaaactttccagtgagttttttaaagactagtcaaaataaccttaacgaaggaaaattcctagaggatagtattcacagcgaattattccagggaatgttatccataacccttaaacgttgaagcagacacccatatgaaataaagggtgaatgcgctacaatatcatcataactcataagtcatttatacatcactcaaccagtaagtactactgatgagtactagacagttcaatcggcagatcaatgacaaacacttggctgaaatcacttccgcatttgagatagcaagcattcacatcatacagacgaagagtatcatgctcataacgacggcaaggaaggagagcaagtttcacttcaaacgtctgatctttttggtcgcattgataatgttttgacctatctccgggtgtttaaactccaacaatttatcaagtttaagagaagcttcagagaaacagctatcctcaatacaggactcagatttgagagcaaaatgaacctcattgacgtcctcgtcaagctggaggcagaagaggtggctgaaaacctatgtaagacaacagaaatacaacagtgatattacagaacaactagactctaaatacagtaaaaaagaaacataactttcagttgacaagacggtgttaaatatcttccacaatcaacaaaaccaaaagttatgctgaataaatatttatatacaacaacagcatccagggtatatagtcaacaacataataataagtttcttgttagtaaacaagctaaaatatatttgtgatcactaataaatatccgaattgtgtttgctccttggtaaaaaatttctttgcattgagttttgttttgaaaaaggctaataacaaatgaaaaaaaaaaattcagggagcaaacacaaaattgctaatttataagggactaaaaaaatgtgtcagagaccaaaaacaaaattgttattttatcatgaagaaaaaacgaagaacaaatttattagaaagcaaacacaaaatttggatatttattagaaataaccaacatattttagctacaaataaaatatcagactagaaggaataagtttaatttttttgttaaaatttaatacagaaacaataaagcgtaaagcataaattattgatatagcatttgtaatcttcaacatagcacccatcccactatcccaatctatgccacaatgcaggaatgatacctatgggtacatccatcttaacatttccaatctgaagacttgaaccaactaagtactatattgggattacagttgtgaagttaaaaacagtaggccatttcacaaaggaaatatgctcagataccagcttgaactcttcagaataataagaattactagagagaattgatctcagcagtcagcacctatgaatttgtattaaaggattacaattcaattcgctatataagataagtcctaaattttagaaacaagatataaggacagtatctatgcaaacaagggttcaacaactttaaagtaatagaaatatttcattgaaaatactaatgtttcgtaaccgagttacaccaattataaattgtgtcctaaagtctccattttctagcctctctggaattctaaatccccttataagcacaaaagattcatttggacatttttcattagattagtactctaatgctgtgtagcagaatggtagatctaactaaactttgtctcccgatgtctgtgtaaagttttataaattcagaaataactaacaaccataatcatttctacttctcccagcaactagttatatttgggagggttttctttttataaatattggttaaaccttcaaaatttggagtacttttctttgaaaagctcaccggttttagcaagaataaggtgagtgaaatgaaattttcccgattgtgtatgattggataaacaatacctaaagcacctaagaaactgcatttgagttttgtacaaagagaagagagggaaaaaaaatagagattttaaacacatttgtaataaatatctgattaaacaagatacagcatcagacatcaaaaatcaaagtccaaactaaatattattgcactcatttgtttttacctttttcatttttgagagagccatatccttaatggcttgggaccgtgacaccaaattgacaacaaagagaccatcctctgaaagtttatcctttacggtctcaagaaaagactcatccaaaaaatccagagcagggcatgtcaatcctgagctgtacaaaaaatgtaataaataagtaggattctttaaaatcatagaagataatgatattattatttctaatcccttaatggccctaataccatttttttcttagccattatatgatagtttaatgtcttaaatgcataattcaattcaccttgggtctgaagagtcaacatcaacaataattatatcaacttttgtcacttctacaccagcatgagacgcagttgaactttttccatgaatctgaggtgctccagaactgtcaatctcccggacaaattggatcccatcagctacatgcacctggattctccaaagcaacaagattcaatagccaatgttgtgatcaccccatcacaagattaattcaacaaattcttatattatattgtggttcttagtattctgcacacagcccttctccctcccaacaaataaaaacagaagtcactttatctgcagttgccatatttttattgccatccatattttaaactggtgtttaaacagcaaaaaaaaaaaaaattcatgaaatcaaaataattacttgcaagagtcaacattgtatgattcaagtaggcatggagaatcttttcttaaaactagttactgtttcatgtggatatttcctttgatgtaagttagcaatctggctttactttggttagtcctaatttagatttacacccccacaacacctcaagaggaagacatgaatgtatatttaactacctttaggcgtttatcctcaaccaaactgaagtagtcccttgcaatatcaacaatcatggggtctaactccacagtctgtagataaaaattattatcaaaccatgtcatatgaatcattcagaagaataaatcattagggactaaatctgaactctaattatatcccctccctaaacaacaggaaaaaaatataaattacctcaatttcaaaaaaggggatacacccgtgaagaaacatgggaagtaaaccagctccaagacctattattactgcttttacctgagatatgtcacttgaatgcatcagcaataatgaatgaaagaatgttttagagcatctgaagaaagtgagacaagttaatttgccatgtatttacaatttgctattattggaaactacagtccttaatgtaccaaggaactagtagattcatgcatcacattaaaagtcagaaatacttgccattttcccacttgatgccacattttccatgtaagaagatattagcgtgaatcctgaaataatccctgtatgataagaactagctacatagccatgatagacggtcaactggctgcttgctcctgcaacatcggaaaaaaatattacaatggcaggagttataaacaacgagcaaatattgaaaactagaaaatgaatagtttcaaaactgtaaaaatcctctgtttctgttaaaccatttttaaacatcatattcatccaaaaccatttttcagcattagaaaggcttcaaaaaaaactatatagataacccaaaacactgtctacaacttttttttaaaagaaaataaattagcaaaatgaaggataaattaaaagagatgattcctcttaggcctcgttacgtttacattgaaaataaatttcacataccatgtaggcatgcacacatcccaatgtaaaatatacagctatgattaatttggacacacatttcaatcatgttcaatggttcaaaaccaattctacaaaaatataaaataaatggaaactttatgatatacaacagtaaattaacaaattcgggatttgacaataatgttgaagcaacacttacaggagttgaacagtaatcttaaataaaccagaggcaagaggaaaacaattaccaatactgtgtctctgagatccactttttctagatttggaagatgcattgtttttcttcctccctgtctcactaaccaatttggtagctgactgttcatcttttagcagagcttcagactgcaccaaatttgcagctctctcaaatacaaggcgtcgaaacaccaactctctagaaggaaaaatacaactgacttcactatcaacattttcataaattacatcttcaacaataattgatccagttaatgaagatgggacctgcaaaacacataatcataaatgatataatgagaatgttgggatcattttaaatcaagcaaagccatcaagagaatgagcatccatgtaaaaagtaggaatcacaaaagcaaaaagactagtgaataaatacatttttgtttcttattgataaaaacagcatttcaaaaaacttaatagaataaagacgtgaaattactcttagatcaataaagcgggtggataaaaaaataaacataataagaaatgagcccagtaggaccccaactccctctaatgaacaatggaaccaagggctaaacaccataaaaagaagctcagtaagaagttaagaatgaagtttcttgcagaatactagagttaatctcacggccttaacagacagagagttcactagatcaaaataataaaatagagacagtattatgtatattgttacaaaccttgtgaatgatgtttcgctccttgatcccatcacttgccatcatgaaactgtagacatttattcaagaacttgtgagaaaaactgaaattcatagtgtttaaatgtgtgtttggttcagcctatgtttgccaacttctagaaagagattttggcccaaaaaaatattacttccacaaaaataatctgaaccaaacatgctataagtatgacaacagcacctgaaaaaaaatggtttacagtatagtaattactgtaattcacaatggaacatgtttgaatgttttggcatgaatagaaaaacaggagagaaaaaatgaacatttatgttaacattgctcgaaataaatgaaaaatcacaaaaatgcaactggtacaagatacagacggtattttagctccattctcattttctgcaggtgccaactgcgtaaccaatggagacaaatccttctgaaaagggataacagacacaattcagtaaaaagcaacatggttaacctgttataatggcacgtccatgaagcataacttatgaggatgttctacctgaatctcctccatgctggtatccgaatggctggcatccaagtaaacctaaagtcatggatttgcttggaagcttcaattagaaaagtaatttggcatacaaaaaatacgaacaaattataattttataaaattaatagcatagtaccattatgagacgagctgctttagagcttctgaccaccatccactgtccttcttcagaatagaaaagccattcacgtgcacgagtctgagatttaacattcaatcatgaaattcaaacagaattactgcataatttgatgccctaggtgtaaactgcagatagatataaaaaaaaggaaatctgaaatcctgtggaatcagctccataaatgaatattgatgcacattgcaatccaaaaaattaaaaaaatcaaatcagatgaaaaaaacaaaaaatgaagaacttgagaaatactagaaactccatatctgccaggtaacaaaccagtgtccctaactctataataaacaaataatcttatcctatatgcaacacagcatagtacaactgatgaactgaatatatattccaaaacaaaacaattacagttttatcattttcagtatgaacaaggttgagactactaagaatagaaattaaaaaagaatcagaaaatttgaaaataacaagtatccaattgtccattgtctttcctagtttcaaaaaaattgtcagcagcagattctagtcaaaagcaaattaacaatggttctttacttccaataataactatttcacatttattcatttgttaaaactactgtgcttgaatctccagagaaggatcactgattcattttgaaacttcatgagcataccatgcgagtttttttttttttttttcttgttatgaagttagaaggaatgcatgaacaaaaatctaaagggatctccgctaaaacacaccttaggcacaatgaaaaccccacagtgataggtaaatgggtcggcctgttcctcggcatcaagaattacagctctgtaagaaaaagtggagtacccttgtccacccagagttagctgcaatcgccgaccttgagaaagctttgtcaactcctcttgcagatcttccacagaatataatatatcagagccactggagtatttttcacgaatttgattctcattttgaagagcctcatgaagtccagaaaccttgcacaaatgtgggagaggggggggacataaacataagacctaattctctgtacaaataggcattagtacttcataaatgtcataatattcagagcattttctctctatttccccttccctgcataaaccctacaacctttaacaaaataactaccccttctctgttaataccctagagtaatactatctatagttatatacgactaacagatgtagcattaatcatccataaatccttatttaaagaaaactcttatgtccatgagaactaaacagaatgtacaaatagcccagatagtctacctgttttgaattacaatgaagtgacngggggggggggggggggcaagacataaacataagacctaattctctgtacaaataggcattagtacttcataacttacacacatcaaatcaatgtcaaaatattcagagcattttctctctgtttccccttccctgcataaaccctacaacctttaacaaaataactaccccttctctattaataacctagagtaatactatctatagttctataccactaacagatgtagcattaatcatccataaatccttattttaagaaaactcttatgtccatgagaataaacagaatgtacaaatagcccagatagtctacctgttttgaattacaatgaagtgatgaattatggagcaatgatgtaatctggtgcactaaagtagacagctccttctccacaaccaccataaatgtttgaaggctaggtttaccagaagactttaaaggtatggcatcaacactcattttccacccaagtcggaactttgagaaaagtagatctggaaattgtgaaatagtgatatttatcctccaatgataccaaaccaatcacgtaaaaaatgaaaaagataaaatgcaaaaacagttccagaaaatcatttcattgcaatgcagagtaacaaagcacactgtccaagtgcactacaattaattcttaaggtaacacaggatagcttcttggtagcatgtttcttttttagcaagacgtccaggagttaggaagggttttgtgcaaaccctcttccaagtatcattcacattcaagtattattttcttatggctaatacacaaaggaaagtctaaaatgtgggtaccacatatgaaccttgttccatgaatctttcaataagagtaaaggaaaacaaaacgtctgcaattgaaacaccatcacaccttcttagtgttttcaattgtattctctacgtatcacacgtttttctcttattattcacggtgaaacaaaattaaggaaacttacttagtacatgagattcagccaaggtaaggcacacaaactttcccccaggctttaaaactctcttcacctgacaaaaataaaagggctaagttaccaaaaacatgaactcgtaagaaataacaaagtagagaaacgtacctctgataagtactggtttcccaatttcgggccaagttcgggctccatcaaagcatccagtccacctttgtcaataaccgcaccgaagctctcatcctcgaactgcatggcggtcatgtccatgatgcgccatcgcatgaggggacggtcgcggacgttgcggcggagcatgtcagagatgacgaccttggagaagtcgatgttggtgatggcggtgtggccggcgtcgtagaggtgctcggagaggcgggagttgccgcagccggggacgaggagctgaagcgggagaggaagggttttgaggagggagaggagtgggtccctgaggttgggccattcggcgtaccactcgaaggaatcgccgcggagggtgaagaacttgtcccagttctctttgctcgtgaagtctcctagggtttccagaatgtcttccggtgaacctttcttcttcccctttgaacccattcttctgtcttctctgcttccgctctcactcacttcacaaacctcttttatactgctgcgcttcacttcacttcactgtcttctagtcaagacaacttactttagcctaatgtctaattaattaaccctcctaatctcatatattttaggaaaatcatcaatgtctcactcaataatcaaaatttctccaccacaattaatcatttttatcttgttcatacatatatatatgatccaaataacataaaagatattatattaacatgtatttatgagaaaaaacattaataatgatgttttaaaaaatatataaatttaaaataactaattttttaattatgaaaaattaaattgaatcttatatataagaaaaaactataactaaattaaacatttcaatagttacataatattattaaatatttatgagtaatatttaataaccttaaaaaaattacacaatatttaaataacttcaaataaataattatttaataaataataaatttaacaataatatttattattaatttaacgtgttaaaatagagatatcatctattactaaaaaaaaacaattatcaattcaaaaacttatttttctttattagtattttttaaaatttaatttttaaatcccaagggagggggcaaggctcctctactcccacccctcagatcagtcgttgggttcaatcaagattatttatcacaagaagacattttgtattgttaaaaattgctaactctgtcaaaaataaaaaagaatttgctaagcaacattacaaaataagtaacaccaacccatttatttcaattgagcaccattgattaactaagatttttttaagtaaaatcatggacatattaactgaaatagcatgtgagagccctcaagtcatggtttacaaagagttggatttgaggaggaacttccttaatccatatccaatcaaaagtagaaaaagtagtcctcgctagacggtctgcaacattgtttctcgttcttctagtatgaactaacaaagtatcgactccaatcctgtaaaacatcctctaaatgtgtagaatgttataggaatttgttagaggatttcgcaaggtgctgattcaaactgactcaaactcagttgtgaatttggttatgaagggagttggttggtcccatcactcccatgtgtgttttatgtatacataatggagtattttgacatcattccctcttttcttgctccagtcttattggctgatgctagttatgtaaattggtctgggctagtttctgtttggcctttgcccatgttttaacagaaaatatttatttatttataataatttataagctaaaaagttttgtaggaaaatatagcaaaaggatatgacattactcttaaccgtggtatcgaaagtacaaattaataccgctaattatttgaaaatcaattcaaataaaataattagaaatgagatattttacaccggtgtaaaactttataataaagttttacaccattcaataactttttactggataagtattttataaaattcatcgttagattgaaagtttatatcatgtagatcacatatatcaaatttcacaaaaatccaaaatcatttgtgtagtgatatcaaatagtctaattttcacatattttagaaatacatatacagttaatttatatatatatatatatataaatatcaattagggttcaaatgatttcgaatttttgtgaaatttgatacatgtgatctacatgatataagctttcaatctaacgatagattttgtaaaatataaatacttatccttttacaccagtataaaaggatttcatttcaaaattaactataatattagtcatcaatttgatgacttgacaacaatgaaattttccatgttttaataaaacttttaattagggataacagcgttggttcgctttcgcttgaccttggcacaaactaatagagcattagcgtttctacttcgtatcactcccgcaacccttctggattctgactgtgacattgattaaggagttcggtaagttttcatttttttgttcaattggaattggttcacccacatccttcatcctctttactgagatgggtgcactgcaaaatttcattttaaatctttgattctaatatttctgattttgttgtgttgttggaatagaatagtttactcgtgagatgggagagttggcgactgagaaacatgttcgatatatattatcagttgaaaaggtgtgctgtgttacccatttatacatggatgctttgtaaactcttctttaatgcttaataggttgtccttttatggtttccagagaaaagataactttgaatctgtcgtaatggagcatctaagaatgaatggggcatattggggattgaccactctggatcttctaggaaagcttcatactgtcgatgttgatgaggttgtttcatggttgatgagttgtcagcatgactcaggttcttcaatgttttatttgttcccttatattcttttagacatcagtgtcattcatagtttcttatgagaaaatgtgttgttgtgaagggggatttggtggaaatgttggacatgatccgcacatcctctatacactaagtgctgtgcaggtgttggctctctttgataagctggatgttattgatgtagataaggtcacaagttgtatccttacacacatattgcctcactttgaaggtcccgttatctgtattaacaaatattttatgctgcagaagaagctttgttatttttgcaatttttttaactattgtagatctgttttttttatcaggatatgtagcttcagttggcaaaatactttgatgttatgattcaattgcttgatatgtttcttagaaagaaaaaattttagtacagttcgatactaaaactacaatagtaaaatttaataaactagaaagcataccggatcttgtgtttcttactatttatgtcagatattgtcagtctgcaaaatgaagatggatccttttcaggggatatgtggggtgaagttgatacgcggtatttttcttacgattcttttttattattgatcatgtaagagcttactgtatttttaactaaaatccactgaattatttgtcctaggttctcatatattgctatttgttgtctatcaatattacatcgcttggataaaatcaatttggagaaggctgtgaagtacattataagttgcaaaaatatggatggtggttttgggtgcattcctggtggggaatctcatgctggtcaaagtatgccataaattattcatgatctttagttagttattaatttccctacgttacttattcaatgtgtgtactaatactactttttcctttaaagattgtgtgcttctttcccacatgaagggagtgctttatgtggtgaagggcatagtttgaaattttaagatgttgcttaaatttgtgggtataagaatcaattttctccttggcagcacagtatagctatgtaacctagtacttacattatccaactacttggtagttttcctgataggaatgatgtactttccttttgttcttttgtggtcaaaatttactcatgttaagcctgaatttgtctgtttaatttttctgttttctgaatttcaaatgaaagaatgaaatgggttgtggacttaaatcatccttctaatatatttgcttttactattgtcagttttctgttgtgtgggggcccttgccataacagggtcactagatcttgtcgacaaagaccttcttggttggtggttatgcgagcgacaggttaaatctggaggtctgaatgggcgtcctgagaaacttcctgatgtgagtaaatcttttcaaatttaggtttagtgctgtagattttcctttctcttactaggttttagatcttctcaggtctgctactcatggtgggttctttctagcctgatcatgattgatagggtacattggataagtaaggagaagcttataaagttcatcttagactgccaggttagttagttgagtgtcttttctgtgtttataactctgcattcttttttctttttggggttttaattattgtcaggtagtatttctgaaatattatgtatgttgaaactgtaaggacacagaaaatggtggaatttcggacaggccagatgatgccgtggatgtctttcatacattcttcggggtggctggtagagtacctccatcatttcacctttttttgttccatttgttgtgctaaaatcttgttatctaggggttccttggtttgtatgggaaccacctaatctctcccattcccatgactcaatgtgggaatgatattaaccagtgacttcattcggtcatcctgtttctaaaaagagagatgaaaaaccatttttatagaatccttgtggattcatgttgtgaagttgctagcattatgttccgaattcagataagattaatcgtattgttcaacatgcttataataattcattagaactggatatttaacatgattctatttttattttagttgtttggaaggtttaagtgagcatatatgtgaattataagctagacatcgctatttttccttttctgacagtgcctattgcttttacactgtaaactatggacgcttaagttgtgtttttgcttgcaggactttcacttcttgaatatccagggctgaaaccggtagatccagcttatgctttacctgttgatgttgtcaatagaattttttttactaaataaggacttaagtagttaagttcgatgataattttccagtaatgacaaaatcttgggtttgtaagactcaccgttgggagttggaccccctcctcccatccctagcccaaaaacagttgatttcttaaaaacagtgttaacattttgagcatcttttagttaaattgcagtggtacgacatgtaaagattaaagattgatcggtattgtagtcaaccatcaaatttatgttactagttactacatagaagtataatttcttttgttaatatagacatagttatcatgccatcgttttggtgactttgttcttttctaaagtgatttttttctttaaaaaaaggagaataagcagaagtcattcactgaatacaattaaattcaaccttctggtatgattagaacgacttctaagtttagatgcaatgcaagttgcagagtgataaaaaaaactccaacagaagacaagatttttttgttcttttaaaaatgtagattgatcgaaattaatgctcataaaccgtggacagaaagaaggccaccttgggcactgttgtcgttaaaatgattattgccactgctgtttttttggcattcaagtgcttgcttctaccttcattttaagctctcgtccagcttctaactagcctatgtggtcttgaagagttgatatccatgcaactaacggatttcgttcactagattacgtatttaaaccttatttttcttaagaaaaagtgtcaagtagacaaatttactattgtttgcttgcgaattcacaagtcttccaatggcatagtttctgtaattatcaacttcatcattttgacacaactacagaaccttacataaacatcaaacagaccatacctctgccaaaaagattatcctgtttaatccttcattttattttatttatttattttaattctttattttttcaaaaatttattatgataatatatcttttaaaattaatttaaaatgatctgtttatctaaatttgataccattaatgaaataaaagtactaacgattcaaaatcataaaaaaatgtaagtttttttctcatcatcttttcctttctcttcttctctctttagatctcaagctgcagcagtgcacaaccaccgcggccaccccaacctcgatccaatactcaccacaccagaaacccaattgcctaaatttctcgtcagaccttaagctgcaaaatctcctcctcctcgatggcatcgacaacctgtctctcttcaatcctcaagctacagaacatcctcctccttgactcctccaacggcgaagaacaaacctaccactgcaactcttccacgccccattaacataacaacaactcagaacgttcgtcaaccagatttctatcgattcgtgtgccagcaagacgacgtcgtcattttgaggaagagaatttgtagaagcaccactgcagagtgagatagaggccttggggaaaatgggacgcagaaatatgagaccagttgcatccacgtcgagttggggagggaagcgttgtccaccatgtacattcaatttgggaattagggtgtcattttcaatttgaaaatttgttttgtttttcatttgtgacggttcagtatctgtatactacttaatggtgttaactttaatttgacaaaagaatcatttttgaatattttaaaaacataaagaattgaaattatttttttaaaatataaaagatcaaagcaaataaaaaaagaagataaaagagcaaataatcatttggaaaaaaaatagttaatgcaacaaccatgaaacacaagcaacataaaaagaatatctacattatttgtacaagtgaaaagagtaaccatgttgtttggctactagaatttccacccactatgatgtttcttttacatgttgatgttgctgcactaccaaaacacacgctctgctttcaaaatctgatgaagcaagcaaatcaccaatgacacctaactctgaaaattcactccaagttgtaagcccaaccgtctgaggtgggtttaactcatgtcttctcccaactatgaaaaagtgatgttcatttactatttggcgaagaagaagagatgtctctggtccaccattcactatgactttttggtaacttacatttcctaagtgtggtttcttaatatgttttagtgcctcattatctcgtatatactccatgtctggtgtgtgttccttaggagcaaggtggtacacaaccaagttgacccttggattcctcgttgctcgtttggctaagcacaaagcctctcggtcatcttttccgcccagaaaaatcattgctacccgaatgaatgagtcactatgaattgcagaacgaccaacaaggattccaactgagcatggagctatttctaagagcttacaatttaaagccctcgtgttcttgtcatcagattctatggcaccatcaccagaccatcttagatggaatggaagaattataatggatgccactttgtccaatgctaaatgacaaacatcctcatgcatcagggagggtggagatatggctgtgtaaatgtgtgcagttactgcacccatgttgtcatgttcatagaggtcaaaagcaagaataacatcatctgaataagacttgtggccacttgatgaaatcgttctttgaatgcgatgggaaatgaaaatgggagaggcccttccaattagctcaattagatgcaatgcatccacagtgatggggtcttctgttgttggacaacaaaggtcaaggaaatttttcactgcagatacatggtgtgttttatgaaggcaggcaactactctcagctccgagtctggttttaaactctctatgttccttttctggtagccagcgtattttcttgatggatcatacaatagtttcacagaccatttcactaagcttgcaatgaccattatgttgatcatcattactccataagtaggaccattaatagtctgcatgcacatataaatgaaattttatattgcattaaatatagaagatagtgataagacttttcaaactcaagattatggttagttttagggtaaattaaattttatccattgatgcttcacgctttctcaacttactcctatattttttgtatcactaaaccctctgtacctttgtttttaccacatctagaaccgtgactagtgagtctaaaactgtagttaaagaaaaaaaagggagggagggagggtgtgttcaatgacaaaagaaagaattggggttacttagtaatacaaaaagaagcgtagggaagtaagttgagaaagtgtgaaattataagtataatttacccttaattttattgaaagacaagttaaggtggaagtaaatatattaccccttcgtcatataagatgccatagatgccgacttccactacgcctttaacgttcaaaatgaggccaagagtcaaggcatctttgaagggaatcttgcaaaagagggcaggtatagtgcatgctattactttgacaaggtgagtgaaaagagagctgaaagcagtgatcataactacttttgatgaaaagtgcttggaaaaatctgccttcatcatactgcaagttacaaatattggcaagaagaaacagttaccaaagaagtgaagcttcttgaccaatgcagatcctaatggaggtccttctggcacagccaaccccaacataaaagctcctaggatgaattcttgatgtatttgaactgcaacccaacctaatgcaaataccattgtgatgacagcatagacataaccatcattcacaggtcttccttctgcagtacgtttgatgatccaaaacattgctggtcgaaaaaataatggaaccaagatgccaaaggcaatcaatgataccaagagcacaaaaatattctggttttcattggcatccataaagatattggcaacacatataatggttttgcttaatatgtcactcaccagtactgaggataacgccaatctgccaagttcagagttaaggattttaagttcattgaggagggaagcaactactgcaaatgaaattacagtttctggtagaactatagtagtaacattaaagatttgatattcaacaggaagaattaaacgttcaatgctgattatggttggaatacaaataagtatcggcacagccaatccaataatagcaatggtccatgccctgtgtcctgtcctggttatcatgctcaaatccatttgcaccccacttgtaaagatgaaaaatgcataaccaattgatgttattgttgcaagtgtgtcctgacttggaaatgaaaacaatttcctcttgtatttgtccagcatctctacctgaacagcagggcctagaatcaggccaacctgcaaatggaaacaagttatgaatcaattaatgagtcttcctatgtgtctccaagaggacatgacattggcctagtttaacaaggaaatataaagtgagttggatggttaagggaaaagggagaagggatgagagaaaagatcgtgggttcgatccctttgctaataaactaacatttgcagattaaaaaaaaaaattgatttagtttatcagtagttataagtaacaagagagacaacactctatttgtattaatatgaaaaattctggacaaaaaaaaggcaaaatttaataattcagctagatgcaagagtggcatatggatgaaatatgagaaattaacatttttccctaaacaacttttacattgcatgctacacgtgacaaatattctgagtgacctcacctagagagagaaaagaagttaaagaggcaatatcaagattttaaattggtcccaatttcatctgattctataatattgtggaaaattgtggacaaatgcagccgatgtggttacaattacggttatagacactccaaaaatcttaacattatggccgaagttatggttgcaactcgtttttttaaaaccttggctaatactaaaggagtgtaaaggggagcttaagtaaatatggtgttaaaatcttaaggttgataaaagttaaaacagaggtgcatggcactcatcaatccaagattaaaaagaaaacacgtcaattcgtttagtaaaaaaaattgaccacctaatattatataatgcgtgtggtctataatgacctactatttattatgttctatcatatcactttggtcatatatggtggattggttttaggccatgatgtgcagaccataaggaaaatccttttaaattagtttgttctctattttatgagaaacattaattaactatgtgaacaaggaaattttaatttatataggctatggctcaaagataaaagatagtaaaagaagaatacttactatcatttgtgggataaattgagggaagtcaaagctctttaagaggaattggcagatttgggtgatagcaaaaagtacaagcacctgcaactcaaacaatgggagtgaagatttcaatggagtccgtccattaagttggccaccccataagccatctgaaacaatattgggtggagcaacagtgcacacattataggtgaaaaaattgattttatcaaccgacaagaatagggtctcatttgcacttaaattcattcttgctgacaatgccaagttaccaaagagagaaatgagaataaaactcaataaagagaaagttataggaaggaagatggctcgatagccagctgtattggcatcataacttctgtcaccaacttttttcctttttgttagcatgttagagattgcaaatgtgagctattcttcgatattgtaatgcaacagaaaacaactaaattttgtgttagaccacgaggaaataacagcactcaatcccataaataaataatctttagaggttgtatagctattttcaatatatgcttgagacagaacatacctatcagaccataacagtacatatttatccaagtacacagttttctatttttaactttataccattattagatatcttatagttatagctaccctttttataataaaaaaacaaaacaatgttactgctactgttttataccttaatgaaaagaagagacatgaaaggcctttttgcatgtatactaaaattaaacatcttacaaacttagaaatacggacacttctaaataaccatgtcagagtcggatgcatatctatatcagatactgtattgacacttcaaatactttaattaaatttaatcataaaaaaaagaagtcactcaccatggggctcgaatccacaatcacaaggttaagaatcttacactttactaactgagctagatagatacttaattttatttttttaataaaattatagaataactttatatattattttacagttatacaatatcaagtagtannnnnnnnnnnnnnnnnnnnnnnnnnnnnnnnnnnnnnnnnnnnnnnnnnnnnnnnnnnnnnnnnnnnnnnnnnnnnnnnnnnaaaaatttggcatgtttctgtttgttttgtatcctgtctcgtacagtatttttcatgccttgttgtcgaacagtatttttcctagtttacaaataatttttcatgccttgttcttgtactactcactttttaaaggaactaactcatacaaaaagttaataaatatagatttactaacaactatgccatcagtcaaaaaacaaaaaaacaactatgccacatatgcactgatgacaaaattaagtgtcagacttttgcataatttttttcactttttatttcttaactaatgtctttatagtactaattaatttttctttttcagaataatttcccaaattatgtaaccccaaattccataaaatacccttttaattataatgtattttttaaaatttgttttattaaatttttgtaaatatatttatttatattattttctattcagtttattattaaaaaagttttaaaagatggtattctctaaagtagaaattcaactatagatcatgatccatcacaaattagcaactggaaaactaactacttgagaatgaacaaatctcgtctttagatggttactacgcttagtataccatatttttacctcaagaaatttaaaacaaaaaatacctataacgttgtcataattttatcaaaaggaatacatattcccgtagtactgattttttttccaacataaccatcttttttactatataattttgcgctttgcacattcttgcattctctcctcacaattatacattcagtgttgcaccgtaaaaatatgaaagctattaagctcgactcccattggccaacgaccattcaactaagggaggaggaccccaaatggtctcacaaaactcatttaattggttttgaattccaaaaccctaaacaatagatttattaggtgatttttctttttattcttctcatttcacctcccatctttcctctcttaaactgaactatttggaaaactcaaatttcaaatctataagatgcttagatttaaatatattgttaagtttgatacaagtgaaatcatagttttaaaaatcgaaccagtgatcgaatcgatcaaggtactggatcattgggtcaatgatcgaaccgataggttactgattgactcgcatgactcgatatataacaaaaaaatttaaaatttttataacataaactaaataagtttaaatataagaaataaaatcatcaatacaaaattatagaattataattctcactcaataactcatttttagtcaaggaaaattataatgatattatctcatctctatatcatatacatacttatacttaatttattttcattttatattaataatttatgagtattttagaaacaaattttatatatctaaaaaataaagaaaaataaactcctatatacaccatttatctattattaacaggcttaaaaagtattcattcaatttaaaattcaaagtttaaaacacttttgttaaaaaaaaattaacccccccnnnnnnnnnnnnnnnnnnnnnnnnnnnnnnnnnnnnnnnnnnnnnnnnnnnnnnnnnnnnnnnnnnnnnnnnnnnnnnnnnnnnnnnnnnnnnnnnnnnnnnnnnnnnnnnnnnnnnnnnnnnnnnnnnnnnnnnnnnnnnnnnnnnnnnnnnnnnnnnnnnnnnnnnnnnnnnnnnnnnnnnnnnnnnnnnnnnnnnnnnnnnnnnnnnnnaaacgatgtgacgtgagtgcttggaaggagaagcagaagtagcggacgaagcctgaagaagacatttttgtttttctttcaaatagtgacccagtccgatttgctggatcagcggttggaccatagacccgaccgggtcgcactgggttacacgggataaaaaagatccattgatagactcaaaccagtccagctagcgaatcatgatccgaccggccaggtctaaaaccataagtgaaattcatttaagatgggacaaccatattttcatttcgaaaaaaaaaataattaatgacttaatttatttgagattaaataattaaatttgatcatttatcttttaaaaaatttaatttaatccttattttttttttcaatttaatcatttaacttttttaaaaatttatttgattctttatcttattttttaattcaatttaattttttattctcaacttgattcttgtctatttaaaattgacgttattaataatttaaaaataaacttttttatccaattttctcccttctcttcacttcttttttaacaaaaaaaatattcttgaataattaacaatgtcgatcttaaatggatttcgaagactaatctaacaaaaaataaaagataaataaagataaaggactaaatttaaaaaaaaaaaaaaaaaaaaaccaaatagttgatttgtcctttattttaacaagttttactaaaccgaagaaccgtgggacacgggaaaggaaatgtgctaactgcgagctgctgtagcttcattttctccgcgtgacatgcaggtttgtcatatctttctttatatactgtactaaactctacaaaatttattctgcacttctgttaaatataataaaaacacaaaccattggctcaaaggaccaagcacttcataagtgaagtgaaaactagacgtgcaatagtacaatttacacggatatggaagttctaactagtctaaagcatcagataaactgcttcagaaattctgtagctacaagcctcccccttgtgttcaccgacattttcagctcgcttatctctttatcaatgtcctgcaatttgaaggccattattatactaaattacaaacaattaagcagaactaacatagaagacagcaaatttttaatatttacaatatcctatataacgtacaacagatcaatgaaagtagccactttaaatgttgggaaggtaatagaaaaagcaaacaaaaacatcatcttgctctgtttcagattatcagtaaatcttttaagttgattacaccaaatatcaaccacaagtacaagtaattggcaggaaaagtctgtaagcaaaacagttatacaccttaccctatttgaaagttaatgtataaggtctagtatctaatatctaataaagaatatcaaaacgttgttctatttttttatagtttattttatttttgcaagttatgcttttctttgcatcaattatcctgggagaatcatgttccatagaacctttgctaatgttttccatagtcactccatagatcatacagtatccctaatttagataactactataagccgcaaaataaaatgcaaatccaagtaatagggtcaacaaaattcttgcctccataaattgcacaataaagtcaataagtttgtgcttctgcatctcctcaaagtgataatttgttataaggaagctaatgtcatatccctgccaacagaagcaacaggatgacatcaatgatcactgacaagttactaagacaaatggaactatgtaaattaatgctaaacctgaacaggctttctcctcagtacttggaaagcctcggctctcattgacagaaatcttagaaattttttggtcagtatgttttcaagttcatcagcctgcttcacctgcacaggatgaaacagaataaaattaaaacaacgaattagggacaaattaaatgtgaatttgatgcttgaaaacaaactctcattcaaatattagtttaataaattgctgataaaattaaactgtaaggtgatataaaggaatctaacattataatagaatatagacaacttgttctggcaaacccctataacactcatttgcaactttgcagtactcatcatatatgtggacctcacaaattggaatttctaagattatcggtcctgaccgtaaaagtaaaggcattaaattgaaatttattaatttttggacaggtgccagttgcacaaagtttaaatgcactgtcctaatgcctgcatatcaattccagtcatcccagctgaatttaattttcacttcagattcagccaccttatcagtggtccatccaagcacagtgaaactttttctcttattattttcaaattctactcaccttctctacctacctattttctatttagttattctaaatttccaacacactaagtataacatgtttcaatattcaagagaagtagagactgcacagtacatcaatctgaagctttacacattgttgatatgtagtacattaacagcaaactataaaaaaggaagaagcataaagaaaaatcattaagttaatgaaagatatcctgagctttaatggacagttcatgtcttaaaaaaacacccaaaatttaatagcctccggttaggggaagaaattgttacatcatcgtggacatagactcaattttagatcattttaacaaagcattagtctcacaaaaaagaaaaagatttaccttgagacttatccgcaatgaattgatagatgtttctattaagcatttttcggcctcatttcgacatatcaaaacctgtaaaaacaattgcacacatttttccataaagcatggatgcaaaagtaatatatcacttaggaaggtagagcaagagaagaaattattaagacacaattaccacctacaagagtctgcttaatcctaatgaagtatactcatttagaatggtagactaaaagaagacattaatgcataataaccatgataatagttagcttaaaacattaacctcattgtttacaattgaatgctaggcactatttaaattttaaccacaaattatatgggctatcttaaatctagtcatacagctaaaatatttgttttcatcacttcttacaatttttcagccacttttgcttgatgttttcatctctctttttttttttacatataaaaaaggatctctagccccgcttagcaccccaaaactgtacatcatgtctttgcattcaattaatatttactattatcccaaaaaagtaaaaaaataaacatttatttttaggagcatttgcatcctatctttctaacaatatattatttcatcccacatcctcaccactaaacaaccttctatgttgatctctctctctggcctctctggctgcgagtatttatttatgatacagttatttttctcctttgtttttagacaagtctcattttgtgttatttttcccctttcagatgaaaaatgcttcggaaacaaattataatttcaccttaagctagcattataaattgcatgaagcctccatcacaaggaaaatggtggaataaggtatctgttgaagtccaacactccactcaatccagaaatactagtgtttagagaatatataggacagtgacaactagctttccttctaattggaatctgtaaaacagcccatcacaacaccatcaactcaagtgctgaagcacaaatccactccttccaacaaagagcaggctatctgcaccaaatttcccaagctattacctctgagaaacagatggttaagcctctccaacctattggtgcatgtgaagaagatataaagaaaaggcatttacaaggtcttctaatttgtcaaaatttgatcatgtaacacttcacaaaagctctgagccattaccctcacaagtcacaaatcacaatgaccttagaattccaagaagaaaaatttaaagtaacgaacaaagtcaatagacaacacaagtgcaaagaaggttatcaaacagaagtttggagtgaagtatcacaaatttcgcaaaagctagactccaaaatcctaaatactggccaatttgaagtttgaagaaggaagaggttttataatagaacaccagtctcattcttaacataaaaaacccaaccatgaattatgatttgacttgcctactttctttagcctaaggccaaaggttctatcaactacttgccacagcccacaaggaatacctggcaccctaacttctcttttcatactgtgaaggaaaagaaaagaaaatatcatatagcagtttggcaattcagaaacctagtcacgtaatcttaaatcatactaatcagcattagtaaagcaagtggaaattactacacagtgatatgaattaagatggatcttaccggattgagcaggagttcagggctggttctgcacataaaccaacagagttcacaaaatcgaccacttttgattttttataagaacaacatcgtgtgaatcgtcgtattaaatgtggaaaatgtggaattaaaatacattttttatttcagtatatggttttccattatcaaatagatttagaacagtaatatggagcaaatgtgcaatgaagtaaagaggggagagagaacgtacttgagttcaacctcgggcttgttatgcctttcgacttcttgacagggaaagttctggaagcataacgaagaagagaaaaaaacaacagaacagaacaagtgattattttgttgatgccaaaagaaacgaatattgatagtggcgttgacgaagaaggagtgatacctggaggcacattgcggcctcgagcgtgttccgaatgcaggtcaagtataaccgcaacgtgcttgcctgaaacgtaaaaagggtgtgattaattatacacaacagagattacttataggattcattgataagggcgtagcgtaccatgaggttgggtctgaatctgaagaaacgctgcgtttcgtttgggaatgagtgatgatggaatggaacaggagtcgtagagtgtaagagaggattaaaggaatgaatgaaagaaaaaggaaagcaaagctaagcaacaaaaactccgtccagtgggggatcccaggaatttcaccaactacgcttttctgctttaccagattcgcttcattgcggtgcctttgacggattatgattgaccccaacacacaaaacaacaatgatgttcatgtacacctactactacttccgtagcatttttattatctcatctgtttggtttagtcttataagcttaatctttatagtttaataatcaaaaaattaaggcttaaacgtaattttgttccctttattttttaaaatctttaattttaatcttctgtcttaaaataaatacatttagtcctcatacttttaaaaatctataatttttatctcctattttaaaataaatacatttaattctctaattttataaaatatacaatttttgttaattggtaagaaattaatttggtgtgacccaaatttagtaatgtgatataagattattgtttaatttacatcataattaatgttaatatcttagtaattaacacttttagtttgacggaagattaatatcacatattttatgaatgtgaagaactaaatgtttatgttataaaatagaaaaattaaaattacggattttgagaaaaaaaaaataaggagatcaaaattgtgaattttagaaaatataaaaattaaatatctctaatttaaaaggaaaccaaaattacaaattttaaaaaatagaaaaatcaaaattatatttaagtcaaaacttaatttatgtgatcaaaaagttacaaaatatattagtttttcataaacatttttattatttcatgtctatcattgaatcatttgcttataaaacannnnnnnnnnnnnnnnnnnnnnnnnnnnnnnnnnnnnnnnnnnnnnnnnnnnnnnnnnnnnnnnnnnnnnnnnnnnnnnnnnnnnnnnnnnnnnnnnnnnnnnnnnnnnnnnnnnnnnnnnnnnnnnnnnnnnnnnnnnnnnnnnnnnnnnnnnnnnnnnnnnnnnnnnnnnnnnnnnnnnnnnnnnnnnnnnnnnnnnnnnnnnnnnnnnnnnnnnnnnnnnnnnnnnnnnnnnnnnnnnnnnnnnnnnnnnnnnnnnnnnnnnnnnnnnnnnnnnnnnnnnnnnnnnnnnnnnnnnnnnnnnnnnnnnnnnnnnnnnnnnnnnnnnnnnnnnnnnnnnnnnnnnnnnnnnnnnnnnnnnnnnnnnnnnnnnnnnnnnnnnnnnnnnnnnnnnnnnnnnnnnnnnnnnnnnnnnnnnnnnnnnnnnnnnnnnnnnnnnnnnnnnnnnnnnnnnnnnnnnnnngtgtgaaggttgtagactttaatagcattttaaatttggattcggagcatatctcaaacctacaaaatcaatttataaaataagaattgtcttttatatattttattttggttatataatttatcaatgtagaatcttccacaaaaataattatttttttaaaagattcttaaaatagaaaaaaaaattcctttaaaataagttgaatcaaacacaaattacaaaaaatacttatttgtcaatatggaacatttataaatgtagaacaattttgcaatattatcctcgatttcacaattaattacttttatattttaaaataactttatacattaattttagaataaaacctcgttcaaattcttaaaaccataaacactaatcactttatcattttgatgcgaaaaatcattcatttaaattttttattttaaaaacaatattacttcttaaatttgatttcaatttactcaatttaaattttaaatattgatacattataccaaaatatatctttcctttccaaatattgatgtgtaacgattttgataacttatttctacaattttgtcttcaattttaaaatcttatcactttaatttatttttgtttatacattacattttatttaaatttaaaaaatatctgtataatactagtatatggataactagctttacctaatgtcttagcaatgaattggtcattttagagtggacagaattgaatgtggtaaggttaaaaaaatacctagagtataaaataaaaaaataaaataagttcctgctattataagcgtacttcacccaagctcacattgacccctccccccaagaaaaattacgtacaaattataagttaaaataatgaataaactgaattaagtgacggtacttcacccaagctcacactaagtcatttacaagcactgaatttgaaagagaaattagagatacaagagcaaaatgcaacatttagactgactgtacgcgaaacttgttggcaacatagagcaaatgactaatgtttgtggtgggataattttgcagcaacttgagattagaagtgaaatcacccgcaaggaggcgcttacgaacgagaacaagcattgcacagcatacccgaagaagcgtttcctgcagagttaagtgcgaagtagatcaccattatgaaaaaaacaacttggaaaagcagtctaatagcaaaatatattgttgataaaaacttaaaattgtcttgatttactcgtcaatggtgctcacttgaactatactatactcatgtagagccaaattctctcctctttcttttgtcaagtaaaagtagctttatatttttttttatacaagaggcagtggaccataagtctaaatgcaagtccatcatagtacaaggttaaatatgaaatgtacctgtggaccatctggatcgcttaaaagagtatcccaaatgtgaaggctgtccgcaaaattgaattcctgagtcagcaggagagtaatccacctaaatgcatagaattgaggattgacctgacattcagaaccagaaaaaatgagcaatctgataaactgttcaatagccaaaagcaaatacatggttgaatcatccagcaggtgtgcatgcaaaaaatgtattatgataactagtcaaaggcccgtcacttaactagttgagaaacataaaacagtataaacagacagaaaaacagtggccaaaataataattctaacatagagaaggtcataatgaagcacgaaggagccacacttgtttatttattatttagcttatttaacaaatttataacagagcagtacacaatgctagcataacagtagatattgcaatcatgcaatgtacaaataaataattaataactaattataatatcaagaattaaaatactttaacagaaatgcctatcctctcacaatatttccaaatttaaacagaaagggaactgtgagaagatgaatatatactaaaactgtcttaccttagaagtaacctcaagatggcgccacagctcttcatcatgttctctcaaaagctgggacaatctcgtaatggttgaacggattcccacaacactattgtcgagttgttgaacaaagttatctcgaaacccactcaatagctcaacaaaacaaaagaatgcatctgcttcagcagaggcctgcaaattataatagggaactgttgagcagagtcaaccaataatacagtagaacatgacattgttaatgaatctacattattccaccatattgccacctaagcaaattgtttacaacaaaatcaacattcccatgttcatattaactattttacatactttctattttatgtatacagggcaatgccgaattacatttggtaaaatttcttgtcccaattcccctaagcaatgattactttttaacttgtcacacgtgaattttttatttgtcttccctttccccattctagcagccccttcttctattaaagcatacactggaaagtatcaggcaaatgaatgaggaaacatgaactttttagaatgtatgcatacaaaaggtaaaagactgacagacttgcatacagatatagtgcatctgatcagagaagaataacaaaggaaaagtacttcttcaaatgaaatttgcaaaatcaaaaagaaaaaatgaaatttgaaccaattaatctttagaaaccacatacaattaaaatcaacatactatggtaagtggtgttaatagagcatgaattacaaacaaggacaataacagagaatcaggtgtttgataatgcaacccaatgatgatagatcatatgacaaacaattaaaagattaaaagcatatactcactgcattttcctcatctgggtcatttttgaaaacatagaatagaggagccaatatctcattcattccttgcacatatcgtacacccgggtttaactttgcaaaaataattaatatattcttcaaagcctcctgaaaatgcccccccaaaaaatagtaataataaatcaaagggttcacggcagaaaatacttgaatttggagtttgtatgaatttcaagacaaagaaaggacctgattagattttgcaaattgggaatcaccagagaaaaagtgcatatcaggatgagtgcgctttacatctcagtcaatttgatcgatgatctctgtatcctacaaaatgcaaagaaggagatttgcttcacaacagcctttgcacagagtattatagtgcattagcatgagatttatataattgtgatacaataatgaacacaagagttcattaaagattaaaatattgacagtagaaagaccattaatagtatgtggtaacaaatttgcttagcccaatttcataaagacgtttcattattggaagtttagaacaaatagatcacagggtcctcttgtactgtcaaaaaatttagagaagcattcatagtagacaataaatgattgtcattacagataaggtatatgcgatcaatccatatttttttggtaaaggaagtttcatgaagaattatggttttcagtgacacctgttcatgtaaaattaaaagtgtcacgaactgatgcatcgtgagacaatattgatggagtttatgcaacattgtcaaaatgcattgtaatttttacttaattttagttgtgagtattgttatcaataaaagtcaaaaattgctgggactctttacattgtgactctttatctcattgtaacttgtcatttaagagtcaatcatctatctataaatatgtgctactgaaatgtgaaagagaattcatccccaaaaatactctccttgttctatttctctgcacaatttttacagtacatacagtacagtccaccatatcctataattccttgagtgttttgaaactttcacaccaatgctagaataccaccaacggttttaagctgaaaggcatcgcatgatttttcctttaaattttaagtactagagcactttacaatctacctggaagaactgattccatacactggtcttcccaagactcaaaggatgctccccatgagtgatttcggatctagagagcaatgccctcgcacagttggcatcatcagtatcacaatttgtcgagttgaacatcttccttgtgatttctgactagctagccacagaaacattcagagagccaaatagataaagcaaatagaatagaatatgcatgacaaatcactaattccacaaaaattccacttgtacacacatacaccctatcaattccacgttgacacacatgcaccctatcattgtgagtttgtgacagaaagaaccaagtaaactacaattaaattcaaataattaatgtgacgacatattccttagaattatctctcttctacaaaccatagtctgtcacaagaatcaaattcttttcttcttcttttctcttctcctctcaccattcttttattttaactctatttctctcttttgctttattttcgatttatcattgggttcatctaccaccgaccccaattaatttgggttaaaggtgctgttgatgttgatgttgattctaaagctcnaaaaaaaaaaaacaaaacaaaagtttaacaaaaataatgaggatgatgacactaaggcatcaaagctccctaagcaactaacttacaggattcatgaaaatctcctctttgaattgtttgtactgtgaccgcttcttggctaattcagctgaccaaagccctcgatctggtggaagatatccaagcaaaagctgcaagtatcaaaaagcataaattgcaacagcattccatgatttcacgtccatctttccatcaataaaggaaaaaactcttgactaaccaatagcaaccaaaccatatccttacttagacttatgaacacacgacctgtttggttggaatggaatggaaataaaccactcgcatatttggttagatgatttggaatgcacatccctagtgcagaaatccttgctccatttttcctaaataaaactaattcacctaaaaatatcagaaactaaatttctattacttttctttcttaatttaaatatccattcaagcgtcactgcattcctatccatgccaaacaaccacttaagctggatttaactatagtatcaatttcatcacacacaccagaaaagaagacaataaaaaattaattagaatgcactgacactgtatcaactaaactacactcgagtgtgaatctatcatgcaatcgcagattttcataaatggtaagtttatagacttactattttaaaagtcgtatttgacatgatttttcatctgttgataatgtataaatctttacagtaatagtgcaggaaaattaaactccttaaaaaaaagactaaaatgtaggggaaaaaaagaacgaaaatgcaacctaaccttccacacagtagaacgtatcccagcagcatcaggtataccttgacacgcgaggctccgcaactcgctcatatccaccaccttctttgacaactgaaccaaaccaaatcatcacaaaatcaacactgttactaaaagcactaatcaacaaaacttcaatgtcgttttacagaagaaggcggagagagggaacctcggccagcaattgagcctggcgagacacgtcgtgcgcggaacgaaagccctcgccgtgatcttccctaggcgaatcatcgattctctgcgtcggcggaggatcgtgggcggcgggaggcgacggaggacacggcggcggctcggagggggtcacgacggcgggggatggaggacgcggtggaggtggctgttcgaaggggctggcgacagcggatgagggaggggacgacggcgacgatgaggaccagagagagctgttgagccaatcggggaccttcttcttcaccattttggtcggggggattggggttagggtttgtcaatcgtgatgggagagattaacagcgaagcgcattggattggtaacatcaacatggccgtgcgaggttgattacatggatgaactagcaactctccaattattcttaacttgattactttcgttcttaatttaatccctaaatttaaatattcatacattaaaaatttataaaaatgagtaaatagtggatgtaatatttattcattcacaaattttaagtttgcttaaaattttaagatttaatacaagaggatgttcctgatctattttaattaagttcttaaacttaaaaaaaaaattgaattttttgatcttttaaaatttgtaattcagttcttagagttagtaaaatagccctaaattattatttttgtgacgattttgactttagaaacttaattacaaaaaatttacaagaccacagacccaatataaaaatatcgcttaggaatccaaataaaaaagttcnnnnnnnnnnnnnnnnnnnnnnnnnnnnnnnnnnnnnnnnnnnnnnnnnnnnnnnnnnnnnnnnnnnnnnnnnnnnnnnnnnnnnnnnnnnnnnnnnnnnnnnnnnnnnnnnnnnnnnnnnnnnnnnnnnnnnnnnnnnnnnnnnnnnnnnnnnnnnnnnnnnnnnnnntttttggaaggtaaaagtgtaatatattgcacatggtaggcaagtctgtacaagaaataaagttgcaaagttacatacagaaagcctattcacaaaaaataaaaataaaaaatcatgtaagatattctaacaatgaggaaaaacaaaacaaatgattgatactctatgataaaaagatcacaaatttatttcttctcttgtacaagaatcactgtcaagaagtgattttagtctcttataagagttttactccttcaaaatgttgttcacgaaaagcaatgttgtttttggtgttccatagacaccaccaagtggcaaaccaaataaaattcccccaaggagatggtaatactaggaagaggtttgcaacaaggagatttgttatcttcttatcttttcatcatttgctcataggagctctcatccttggtaacaaataataacgaaaaaaaatcctaaaaataatctccttagtcttcaattttgtttagtacattcatgagttgctactactcaagtttaacatgtttcaatatcagttaaattgcgtaattttttctgataatgtaccatatcagttaattaaacaaaacaaactccaagcacatctcatcaccaccacctccaggttggtgtctcgcggcatagatctcagcaccatcttccatattaagctgaagtcatgatacataaatataaaatattaaactataagtttgttgtatgaaaaaaaataaagaactatatgcaaaatatgagatctaaatattacttatacacaagcagtagacgcacagttcaatattaatttcattttcacaaattttagtgtactatgagactatgagacgtaaataaggtaaagaaattcatattgaagtaaaccgaaggtgtattcccaaaaaagacaaagttatgcaagaatattgagcagggcaggcctttctgatttcctgtgcatttttgtgtcttatttatattaatgataggggtgagtttctttaactttatttttttaaataagtattttttaaataaaatatacaacggatgtgtttgtttaaactatttttacttaaaataaacagtttttttaagaaacaaatagaatttgtttcttaaaaaaaataaaaaaaaatatttatataaaaatacttattttaatttatttattttaaatttaagaactcacccataattttaactctcaactaaataaagaagcaaaacaaattagaaatatgaaaattaagaagaagaaaaaaaacttatgctagatatttttttgaagagcctcatgttaagatacttagtcttctagaaattgaaacaagcaccaaacatggaccctgaacagatgaaaactgagcatatcttatgcttcaacgtatagcacagtaaaaaatacccaaactttgtgtgacatgacatgttatgaaagaaactaactatttttggtgtatgttttccgttaatgtgaataccatcgtataggaactgcaaggtctcgtattagatggtcgacctctggatgtagtcatgttcttctacacatgcaattgaagattgcacaaaacattttagatgagtgggaaaataaaacatcaattcaaaccaaaccacactaataagttgaagaggggtacatgcaatttattttattcttgaatcggtgacaaaggaagagaagaaaaccacaccagtgtggtttcaactcttgatagctagatctggttatggttgtaactcctagtgtttgtttcttcagttcctaaaatgtgttaatgaaaaaagttaagtgagtgatgtagattttcatatttttaaattgggttaaatatattttctctctcataaatatagaaatattttgaatttttctttgtaaattttgaagtatattttttattttcacaaaattaaagtatattatgactttttaaatatgtaaaagtgacatatgtttacgttgatctgtatataatcgatgtaaaaaaattatgtaaatatatttcttgttccaagcaaaaagttaaaattttacataataaatttcaaatatttttatatttataagaactaaaaatattttgttgtgcaaattttcaaatctgtgttcaggtgttcttactgcagagggaattgattctctttgtgacagagcatgatagctttcaacgttgtcattctttctattatttctaatgcaacaagcctatacttgaaattgacctgttattaattaaaagcgtcctcaatttctttaacagtttgcatttttatacaaaagaagaaaatagtataaataaatcaaaatataataagaagcaaacttttgaggttctattaaattagaagtattttacagtgtaaaatgcaaaattcatttacattcagaagatgcgaaaggaattcaaaataaaacaaatgcactgtgatttttacatagtttttgttgtatgagtaacgtgctgtccactatagtcaattagtgttgtgccttgtgactctttatctaattgtaacttcttgtagtttaagagtcattcatcttatatatgcctatgtgctgctgaattgtgaaagagaaaagaaacaaaacagtaaactattcgatcagcccttgaaatactctccttgttctatttttatgcataattttacagtacctacgctccacaccatatcctataattccttgagtgtttttggcaacttagcttgtgctatacacccacatacatgtcatgtccatttctcttcccccacccaccttcattattccttattcatattcacgtgacatcattccattgcactatatatatctacaattcaattattgatggatatcactaactagtgttttaagtaaaaaaaattatgaacaatgtattttatgcatcttaataatttttttttaaacttttagtcaatgtcttcaaaacatttattagtatttgttattgtttattattcaaacctaagggtcagtttggtaccgcagaaggctgataaagttttcatcactggaatggccggatttggagagtcaccaaactaataaaatggtaatactaaaaatactctccttagtccttagtcttcaattttgttcagtacatttgttactaatactactcaagtttaacatataaacttgatatacaaacagttaaagtgcgtactttttctgataatataatgtaccatgtcagttaagcaaattaacaaactctaagcagtacaacaaacatttcctagctaatgcttttaagagtcaaagtgccgcagcaccacctccaatttggggtcttatggcgacgatctcggcatcatcttccatattaagctggaatatcaagttacaataatataaaaaaattaaactataggttagttgtgtgaaaggaaaaaaaaaaaggactatatgtaaaagaacagggatttattcccttgatttgtattgaaaataatttaaatggatacacaaatagcacacaaaattgacgaattattttattttgtaaatcaatttttttttcatttactgagaaagtgcatattttaccacaatcttctttcttagtagtaaatattacttctacactaacagtagcgatgcacagcaacaaagtgaaataggttgaaataacctctaatacacaacactattgatgatttcaaactgcagtagtatgtatatatggcgctaatcatttaagaaaactgaattttttttcttttttaatcaaaaggtatttaggatttttatttgacattcaacaagtgtttcttccatcaaatcgatctattttggaataaaatgatatttttacttgcaactccattcttaagacgggaatttattaaactccagatcttcagtaagaaacctaaatatcaaatcacctgtgacaatttttggttatttactatctctattgtatattacagcctcctagaagggcatattaatatcattttcacaaattatatatagtgcaatatgagacgtaaagaaggtaaagaatattgtaagtgcctttctgatttcctatgcattaggcatcatctatatatactattctgccaatgtcctatttttgttgaacttatgaaaaaaaatactttgaatgatgttttattagaaattgtgatatattaaaaacttactatgtgatgatattatatattaaaacctaaagcattatgtcttatttatattaattataatctcaactaaataaagaagaaatcatgaggagtgctagtatcattctctttaacacattctaccacacattttactattggttataagaaagacacattaacataaagaatgtgtgtaaaagagtgcattagaaaatccattacattattaacatttctcaattatgagatattagaaaatatgaacactaagaactttgtgtgacttcttatgaaagaaactaaccattcttgctgtatgtttccccttaatgttaaaaccgtcataaatgaacttcagggtctcgtaatccaacttctgtcgatcacagaactctttaaatacattaattaacttcatatcccggttcaccttgaagaacaaattacgcccatcctatggttcaatgaagaaaagttaaggtgagaactcaaatgttgtattcaaattccattttgggtctttcagtataacaatgtacggttataatctcaggtgttgcaattgcatgattttagtcttcatgttccaattgtgctaattgagtctaaattaacacatttgtacaactttaatcctccacacacacacacacacacacacacacacacacacacacacatatatatatatatatatatatatatatatattatttcatatatattaacaaaaatttgttgttgatatttgtgctacctttaaaatccaattggtgaaatgtgaggattaaaatagtaaaatcacatttcggtgattaaaatcgcactgctatacctaaaaaaaactaaaagtacaattaggcttacaaaatttaggcagaacggttttacgcacagtttcatataacatttgtcataaaaaaaatatcatgtaataatgatttgatgcatgaatataactttcgttcaatatgacaatcaatatctttatagacattacaggtctacaacaactggccaatacatacttatagaagattggtgcatactgttatgtatatatgtgcagactctgctaaaaaattattacgaaaaaacaaaggaatattgtggaaagagtcaggcatacacctgaagtttgatttttaaattgacaggctcatcatctgatggagattttctcttaagtggaccattggtagccatattcttcttctgcacacacaaaggggagagatgtatgatttcaccaacctaaatgcaaaacaaaaaagttccaccaatcatgagtttctttcacaatattgaagaataaaacattttttttaattatattagaactataaaggccaaaagctaaggtctcattcccaaatagcatttaaaatcgcacaaaaactattgagatgggtagaaaaaaaaattgtttctctgtcagaatgtgaaacaaagcctccaaaaccatactaagttgaagagggctacatgcattttcttaattttattcttggatcagaaaggaagagaaaggtgcggaggaataaagagaaaaaataaacccaccaaaaggacagagaagtgagcacaagaactttttggtttcaaatgaaagctgaaaccttttatgattgtgcctgtacgttgtagtgtttgtttcagttttctaaaaggtgttaagtacgataaattattagggctcgagaactattatgatccctattaatttttataagacatatatttttttggtcttaaatgttattaattattttcttatcaattgaaaattcttggtacttactactaccatataaagattggttgagattatatacttgcggactacctaaataaatttctcgttaatgacataaaggttccttaagtagtactgagtttcaattaccaaacaagtcacacaaaaaaaaaaactgattattcatatgattagaaaacaagtagcatgtattttcaaggtagaacttcaaatttattcactaaacattgcaatccgaacatataaatacgcgatagtgagctcttcaaaagagctatcagcaaactatttcaactgagtaaaaagctaatcaagcgatgaacctggcataaaaattggaaaaatcacaaaaataaaaatgaaaacataaaaaaaaaaaaaaaaaaannnnnnnnnnnnnnnnnnnnnnnnnnnnnnnnnnnnnnnnnnnnnnnnnnnnnnnnnnnnnnnnnnnnnnnnnnnnnnnnnnnnnnnnnnnnnnnnnnnnnnnnnnnnnnnnnnnnnnnnnnnnnnnnnnnnnnnnnnnnnnnnnnnnnnnnnnnnnnnnnnnnnnnnnnnnnnnnnnnnnnnnnnnnnnnnnnnnnnnnnnnnnnnnnnnnnnnnnnnnnnnnnnnnnnnnnnnnnnnnnnnnnnnnnnnnnnaaaaaaaaaaaaaactcacctggaaatagcggagtaaaggaagtcatagaaaagagagagaagtttgaagctgagaaaaaggctttcaaaaaaaggtagaggggggagagggagagaaagagaagtgatatttagttaagataaattaatttattaacttcttcaagcagtttttctctttcagaattttaaaatgaattgggaaaataatcaaaagatagtagtactatttagcaaaggctgcaatttttcaaagctcctagttcccagaaataggtgattcagattctctccatgtactgaaactctattgtgtaaattttcaaattgatgtttgacatccaatttcactactgctcttgcttttcataaggtggtgacaatacattgctgcagaggacattgattctctttatgacagcatgatagctttccttctttagatttctgatgcaacaagctacaagcctactaaattaaatgtagtgctgaaactgacctctcattaattataagctctctcaatttcttggccaaagtaccaaaagggaaaattttaaaaaaaatttaccatttgggacaaattttaatctaacatcaatttttggataattcatagcatatattataatttctaaattaaaaatcgtaacatttgttataatatcattttttttacattgaagtcataaaatattttatgattttaatttttttaattacgactttaatgtggtttgagttttttttatgacattaaaatcataaaggataatatttttttattgaagtcataaattaatcacttcaattgttaaaaaaattatatataatttttattttaattatttaatgaattaatgtatgctttcttttttaattttatttaatattttctatatttttttatatgattttattcaatatttttaatattattttatttaatatattttctatatttttatatgattttatttaatattttcttaatttttctatattattttatttaatacattttttatattttaaataaggtaatatttatattttttatattgttttattaaatatattttttcaatttaatattttatattctttattattatnnnnnnnnnnnnnnnnnnnnnnnnnnnnnnnnnnnnnnnnnnnnnnnnnnnnnnnnnnnnnnnnnnnnnnnnnnnnnnnnnnnnnnnnnnnnnnnnnnnnnnnnnnnnnnnnttattttaataactacttttattattaaattattttttattattaatattaaaataatttataaaataaaattaatattattatacaaaattattaatttatttaatgaaaattgtaaaaattagttaaattttttaaaaaattaatattatttgataaattataagtgaatattattggttaatgttaacaataaaatattttaatatttttgtttaacaaatatttaatatgttttaatatttttatttaaattgaagttttaatttacaaaataaataaaatgatataaaaaatattaaataaaatcataaaaacataaaaatattaaataaaactaaaaaaataaaacatacatnnnnnnnnnnnnnnnnnnnnnnnnnnnnnnnnnnnnnnnnnnnnnnnnnnnnnctatttaaattagaagtatagtaagtaataccgtgtaaatttagtaagaagaaaatttttagatttttacattattattcacttaccattatgtttaaattttaagaaaactgaaacaaaatattgacagcctttctcctatcttctgatttaccttgaatagcaccctagagagagatggattgtttaagtgcatgtttaattaaaatttataaacataagtttgggtcaactttaagtttgcaaagtaaatttacaaaaatatttaaagtcttgtttttccaaaattaagtttccaagcaaaaaatttaactcaaatatattgttagagaataactaaacatgactccaaattatactctcaaagatacttttaaaccctctcaatagaagtccaaacacaccctaaaacattattagttggtaccttacaacaaaggcgcagattccaggaaatcaatttctatgtgcggcacattccagaaaagccttttgacacacaaatattatatatacaaaatcaatcaatgaagaaactgaaaaataaactaatcacatcacgtactaaaatcaacaaaattcgataaatccttacatcaccgtttcccatccgaacagggatttcatccttgatttcgcaaaatgttatgtattcctccaaaagttgccttatacatgatatgcttgcaggaatgtatgacatttatgttcttctcaaagaatatatttttgacagtggtgtatactctcttttttcaaagaataccaaatccattatagaaagtttgactccattttgatcacaatgctacaatggaaggtgcaccaaaaaaattgcacccggacaagaatttaaaaaaaatcaatttacaaggaagttacaatagagaaaaaatactactagatcaatttgtctattaaagctgaagactagatagtccttaaaagctctctcaaattagccaatacatggcgtggtcccaaactcttggcatcaacgaaattcaaaagctgttctaaatcctacagtcagaaaagcacgagggaaaggagctgtaagtcaaggttaatcaggacggataatgtgtacacagtacaatatatatcaaatatcgttcaaacaaccacacttcaaaaaaaaaatcaacatcaacatcaataatacctttaatccaagttaattggaattaatggtagatgaacccaatgatagatacaaagaggttcaaaaaaaagtggaagcggaagggaaaatacgataaaagaaaagaaggggaaaagaaaaagggaagagatgaagaggaaaaaggctaaaaagggaccatctgaaatatagagataacgatgagtctaaccctccaccaagattatagtttttcctcatttcgtcctaagacacaccgtccgccaatttatatctcactccattaagtcttgtttaactactttttctcatgtaagtttcggtctacctctacctctctttgtgtcaagttcttgataacaaacttttgttcagaggccgtctcattatgggtctaaaccaccatagtctatattccctcatcttttcactcaccagtactattgctacctttcgccaaatatcttcatttcttatcttatccatctttgtatattcacacatccaccttaacatcctcatttctgttacccctattttatgttcatgttgcctatgtacttcaagaaaaaaattaatgacagaaaacaaaggcactaacaagtatgggagaccatatttgagatataatatagaattaaaagtctaagacaacctgccagccaacaccaatgcaaaaccaacagcctgtcaatatagtaaatgttaatcttgctactcaattttgggaacaggatcacctacagttgtttgtaaactgcagggtcctgcagttaaaatcaaatggtctaaaatgttgtaaggtgcaacttattttatttttcagtgtatgtaatgcatttttaatggtgatgatttcttgacaatggaaattcaactgcagaacaatcatagttttgttttttggtaggaggaaatctttgggggaaaaacaagagatgagtttttaaacagatgtttcttagaattaaagcatctcatgtaagcataactaaaaaacaaacttctaatctttcatgccatgaaacgaacaaaggcatttggctcctctggagtaagtaatctcagctgttgagtataaataaataaaaaagcaacggtcaatattccaatacatccccaattggttatgcatgtgcatgtgatattgactcttgattttctcattgacaactgagatttgttactctgccctcttaagtgaattgctcacttttgaaaaatcaaatttcaaacaaagagttgggaaaacaaaaaatagaaaagaaaagaaaaaaaaaaaactaattctggaggaggacctgtcctcacttccagttagctaacatatacagtagtgagctttattctcatagtaaaatggaaatctgccaattcagtctcttttcattacagagaaaagcacaagcaaggccanacatatacagtagtaagctttattctcatagtaaaatggaaatctgccaattcagtctcttttcattacagagaaaagcacaagcaaggccaaaataatttcttaatcaaccaacatgttggaaattttgagtagagtcccaaaaaaagtagaatactttctcttacaaaaagcaacacaaaaatcatagccagaaagctaattacgtgaaacaaatgggaagtaaactctaaccatgcaaaagcaaaacacagatccggcaatcttgcaaaatatggtaatgcataaagtcatcaacaaatataaaatgtccatgatccaaacaaataaattagataaatgataaggggcagaaagtgtcagcaaaaaaatgcactaaattgttttcttgggaattctgaaggagacaatgaacaagataagactacccctgttatgttttgccttagttcaaacaaagcacgtaaactcaacgattgagagtaactacaaagcaaaaataaatagaaatatataccttatttagtaagaaaacagcataagctgctcttgtggtgtcttgaccttctaaaaaaagagggaattccacatgtttggcgtttatgtttgcatttgatgaagcttcagaagatgttagctctgttgaaggtgcattatcaataatatatgaatgagaagcacccaaccgtaaaggatatcgcaaaggaacttgcaagtatgaggctataagtgaaacagcctgcgagaaaatcagtctagtaaagaacatttcaataaataaataaattttcgaaaaggaagacatttcaataattattagctcaacgatcatccacttgagctacaataagaaatgctgcagctggaacacagaagtttggtatatgatacgaaaaagcattgacaattaagtttgccatatacaagacatgtcaaaatatgaaggcttcaaatacattcttcgtcccttcaaatatactagttttcggttttaatcccagtaactttatgtttctaatttgttaacatttttagttttggctcttcccattagtcatgaaagtgtttttgtaatggaagaccaaaaaacagaaggtttggacattataaagatcataaaaaaaaatgtatttaaaccatgatctgtatatgacaatttagaaaccactatattagtaaaggatggaaaaaggtatttaaaccaaatatgtatatgaaaatttagaagctgtacatcacatattttggaaatggatcacaaaaggcataagaaagaataatatgaacagttctgaggcaaaaaagggccgggtaggttctaatacttacatgtgcaacatatcctagggctgtagcagaattctgaatttcctttttatcagtgaaaaagctcatcttcctaaaagatagcacattcaaatgcagaccatgaattgttaaggatccttgattaattggttttagtccagcagaagtccctgagtaatgaaataaatgaaacttttacaataaaattcagcaaaaatatcccttagaaatgcagtgaatattagcaaaaaaaaattgtgataatttaaattagcagaagataaactatacttaacattcaatgaatagctatggtcttctagagcatccaaaggatcaaccataccaaaatctacagtaccaaactaaattataaaattataatttaaggccgttgtcaatcagcaaaactagtgcagaagcatgaaagaaaagaacaagatatgaggcacacacatcagacagacgaagtacagaatgaaagacatcctttcaacacaacagtccaacttacagaagaactatatccaaggtgccagtaagaaattaagggataatgattgaaccatccagtacctcaagtttcttagtttatttaaaggcttaaatatgtttttaatccttcatatttgggtaattatttttttagtccttcaaaaaaacacttattagtcccttaaattttcaaaaagctactttcagtccctctttgttcattgtgtttatggtttcaaatgtggcagtttttaaccaccaaaataaatatttttaatttaattttttaaaaaaccatttctagcgattttaaatcgccaaaatatttgactcatggattgttggccgctttttacatattttggtattttaaataagaaaaataaaaacatggatgttgaattgtgacgcttttttacatattctagcgattttaaactggcacaaatcatttttccaataaattaaattaaaaaaattctagtgatgagaaatcgccacaaattgggacaccattaatgcaaagaaatagagggactaaaaatagcttttcgaaaatttgaggaactaataaaaacattttttaaggactaaaaaaacaattacccaaatttaaaggactaaaaacatatttaagccttatttaaattgtaagttttgtattttgcatgaccgaagccatttttttaccttaggggcactatccacacacaaaaaagactattattgagctaaccattacctgccaggctgcctaaaggatatgcttcaagctcttgctcttgtgctggtccaaccaagatcttaacaggatagagcattgaaatttgagatgtcatgtattgttgcctcttcctgagcatcttttgcaattttatcagatgaacataaccattttcttcagacagaaatctacttgattcctataataaaagcatcatcagctttctagctactagaataacaccagtaaaatacaaacaataatcccttcccctaaaacaaggaataatgataacttatatatatattcagctaaataaattcgtcaaataccatttcttacatggactaatagagaaaagaaagcttttaaaaaatgaggaaatttgaaataaaacaagaagttcatttctgaaggacaggtacaagtggagctaaggaagatatactctattcaattgaaaataaaatcagtcaaaagcaaaaaagaacaatactccaaatgtcaatttgtaacacatacttcaatatcaataaaatgaatcaatctttttaatcaagacaacaatgcattcccccttgtgaggtgaccaaaaaagatataattgatgctaagtcgtgcatggcattgtggggtgatgccgataacaattgggaatatcttccagcaatcaataaggctggtggattactatgcatatggagcaaggaggcatttgtgttggataacaagatttcaggggctggatttatttatttggaagggacatgggtagcagatggcagcaaagccacaattgtcaacatatactcaccttgtgagttatctatgaaaagaaggttatgggaggatctaagacagctgagaaatacaaatatggggggtttatggtgcattataggggactttaacaacatcagaagaccacaagagagagtagggatatgtcagagataccaagatgaaggcactgtaagagagttcaatgaatggatagcagatatggaagtagatgatgtcccctgtatcgggcgactctttacatggtataggccaaatgggtctgccaaaagcaagctggacagagccatggtctcagcagaatggatcgctaaatggcaggatacaactcagttcattctagttcggaatttctcggatcattgtcctattatactgaggtcatcgctggctgattggggcccaaaaccatttcgggttttggattgctggcttcaggataatacattcaggaagcttgtgcaggaagggtggaattcaaagcagatcagtggctggggtggttttgttttaaaggaaaagcttaagaacatgaagcagaaaattaaggtctggcacaaaacacattttggagacatgcagctgaagattgaatcactacagtcagaacttaacaagctggagactgaaggggatgacaggcattttactgaagatgaggtgctgaggcgaaaacagttacaggaggaattatggaccgctgctcaggcaaatgcctcaatcttgaggcagaaagcaagatccaagtggatcaaggtgggggactgcaactctacttactttcacatgactgtaaattggaagcgcaatagtaacatgatcagaggcttggtggctgacgggagctggactgatgagcctcacagagtcaaagaagaagttaggatgttctgcaagaagaaatttgaggagcccattctaaacagacctaatttagatggcactaacttcagtgccattgaacaacacaacttggagagtttggtggcaagatttgatgcaatggaagtcaggaaagctgtgtgggagtgtggtaacgaaaagagtcctgggccggatggctttaatttcaagtttattaaagctttttgggatatcatcaaagccgattttctccgtttcatggatgaattctatgtaaatggtacaatccctaagggtggtaatgcatcttttacaactttaattcccaagacacatgatccacagggcctaaatgatttcagacctatttcactagtgggctgtgtctataaggttgtggccaaggtgttagctgcaaggctgaaaaaggtgatgccatctattattgaccaacgacaatcagcttttattcaagggagacagctgctgcatagtgttctcatagctaatgaggtagtagatgaggcaaaaagatcaaatagaagctgtcttgtgttcaaggtggattttgaaaaggcatatgactcggttagttggacattcctgtcatatatgatgaagaggatgggtttctgtcctaggtggattatgtggatcgaggggtgtttaaaatctgcttccatatcagtgctggtaaatggaagcccctctgcagaattcacacctcaaaagggccttagacaaggtgacccacttgccccactactgtttaatattgtggcagagggcttgactggattgatgagagaagcacaggcaaaaaacctgtttgatggctataaggtggggagaaacggagttgatatcagcctgttgcagtatgctgatgataccttgttttttggtactgcatcaaccaaaaatgtgaaggccattaaggtgatgttgaggaccttcgagatggtatcggggctgaagattaatttcgcaaagagcagatttggggtttttggtagggatgatcagtggataactcaagctgcaacatatctgaactgtagaaggctggttttccctttttcataccttggaattcctattggagccaacccaagacgtcttgagacgtgggaacccttgattaaaaaatacgagcgaaaattagctagatggaaacagaaatatttctcttttgggggaagggtgaccttgataaagtctacgttaaactcgattcctattttccttttgtcttttttcagggcgcctaagaaggtcatagcttgcattgagaggattcagaaaaggcttttgtggggcggaactgatgagcaaaggaagattgcctgggttagatgggggctgatctgccaatcaaaggagcatggggggctgggcattaaagatttaaccaaatttaatcaagcccttacttggtaaatggttctggaatctttttcaccagccacagctactatgggcacaagtgttacaatcaaaatatgggggatggagaagcttgactgaaattacaaggaatggtaaagagtccatttggtggagggatctcagctcattgtgtaataatgatgagaggcactggattagaagcgggattagctggaaggtgggaagtggaaacaggattttattttgggaggacggatggaaaaatgatggaatcaccctgatggaaaggtacccaagattgtaccagctttctaatcaacaacaatttttcattcatcagatgggcaaaatgactcaagacggatgggaatgggagctcagctggagaagacatttcatggagggggaagttgctgctgctgtaaatttcatgaaggacattcaacatgtggtaatacacttacagcaacaagacacttggagatgggcggctgatttgagtggaagttatacagtgggaagtgcctaccactacatcgacagtgaactgaatagtttgcctcatgagggtttcttcaaggtgttatggaaattaaaagttcctaataaggcactatgctttgtatggagattgtgtaaggataggttaccttctaagatgaacctgtgtagaaggaatatggaaattattgataacacctgccccttttgtagaaatagtgaggaggacgtatcccacttattcttcagctgcagtaggatcatacctctctggtgggaatgcttgtcgtggataaaggtcgtaagtgtatcgtcagcaacccctatagagcactttacccaacactcctcctatgggaatattgaaattagatcgatgagatggcagacctggtgcgttgcattgacctggactatatggcgtcataggaataggattatcttccatgctgcgacgttcaacagtcaaaatctgatggaggatgcgctttttttatgttggtcttggcttaaacatttggaggatggctttactttccctttccacttctggtcctctaatatgggagaggcttttgttatcaggggagggtagttttaagctgtattttttgttatcctagttataggtcagaactcaggaggtcttttccatgccttcatggtttaaacctccttcgttctgttgaacactaggttctttttgcaatacctcttgtaatgcagaaactttttcatatatatatacatattatttttgctggtcaaaaaaaacaatgcattccccctagaactactgaactttttacatttaataattatttccaggaaagaaaagatattatatgaaaattcaactacaatatgacataaactcacctggagatttctgctggttacagaaagagtaccccctgccaccaaaagtgattgcactgcaccactaagctgctcctcctgcttgctagcttcctcctttgccagcctagaacgtatagacatattctccatcaccattttctttgattccaatttttgacgcatctcctcaagttcattcaaccaacccaatgattcagcattgacctgttaggcgggctcattaattagggaccagtaaaaaaacaaaaaaccaaccatgcacctatatattggaaacaattagtgcaaaaaagcatcccaaggtgtaaacaaaaactaaaccactcaataccctgacaagactgaattggtgtgctaaaataaaatcttagcagcatggttatcaatctgggataacggcacagagcaaccaaccccaaaacggccacagcaagatagcagatagtgggatgactactattacaaaatttattgatataattataaattaaaacaatgtgcaagtatgtgcacgcgcgctaaaaaaatatacccacagaatgagagttccacagattgttagttggctggaaacgcagttgagagctttcggtcagatggtttacaacgaagagagaagagaccaccccctttgatgtgaacagaacagattgcaaaggatgtgaaccaagtagaaaccacagaatggtgtgccagagttccacaggttgtgggttggctggaaactccagagtgctacggtttggccagcaatgcagttgagagctctgtgtaagatggtttgcgttgaagaaagaagagattaatgagagtaatgtgttatttaaccttagaaaggagtgaaagtgggaaatagtttgtgttctgatcaaatataagagggggagggggaaaaatcccaagattgcccctcataaacagcaccaaatgacattgttcaagggggcaaaaagggggtttcgtctttgatgcaatgacaaccggaattcatgccactccaggcacaacggtgagttgcgacatgacaggcttccttggagcaggccatagacatgacattccacgacaccactatagcgtgactgactattacgctttgcaggctattctgagttggaatttgggaatcaagcatttccctttgttcagatatcatggatctactcatattggacacattaaccagttaagatccaagatatgcaacagaaaaaattcatggcacactaatgattgtacacctactcagacccactgataaaatttaaaacatgaaatgatcagtgtaaaatcatatgtttgatcatcagaaaattatttctcttaaatcctctccaaaaaaaggtaaatatgcctcatactataatttataatcaaagttatgtagttctttctccttattctgataaagaggaagattaagtaataaatatttatactaggacaaaagaaagtgcctagtcagagataatgtgttcataagtaatcaaaggtaaagaaacagactgaaaacacacgtcatcttaacatgactctccaatctctgtccacagacctttccagttaccactgacaaggctttcaaaaaaaaactgacaaggccaaaaggtaaaatttaaaagcataattaccaacagaaacaagtgtattgtagatccatattaactaattattgacaaagaaatgaagccaacaaagattgatttagttaataaggatcaaagccacgtttgtaaggcttaggtccaccccccccccccaaaaaaaaaaaaaaaaaaaaaaaaaaannncccccaacttaactttttttttgttacccaaaacaatgaaaaattagagatcaactggtccaaccacaatacacctcagccctattagatagtgatgtgtgcttccaagtctctcgctaatgaactcaaacaccactacccaagaccaacagatcacagtccattgtaaggcttaggttcaatccctgcccccacccccaaataaataaataaaaaaaatgtgttgcccttggaattatacacatttggtcccaatttttccagagaaaataaccgcactgtaatcaaaagttctttatggaagccggcaaaaaagagactatttttccaaaacaagctgaacaaacatgtacattttcttcctccttaactttctattaccaagaacaaaaagagagatgaaagatcatccagtccaatcataataaacctcaaccctcctactggaagctaacattagctctttgtctcgttcttgaatcgattggaattgaaatggaataattaatctatttctccgcctctttgctaataaatccgtagtatcatggaaaatagtaggatgtgtaaaatgattgaatttgaagcccctctcagctaccaacttaaacattacaatccaaaaccaaaaaagtaataaaatagcctagttgtgaaccgaaggatctgcttaaaccctaaatggaaaatgagccactaataaataagaaaataaacaatttgcttctaatttatgatataacgcaacgaactcaatcccccaatttccgattagatagtgatggacttaaagcttctcagcaatgaactcaaacaccactgtccaaaaccaaaaaataaccacaatcccctctaccctaaacacacctgcaagcaaaaatcactataaaccatcattaaggactttagcatgccttggcagtggaattaacacacatttggatcccattttttctgagaaaataatcactttgttatcaaaagttctttacagaagctggcaaaaaacagattatttttccaaaataagtggtgccaaacacctacaattacacnnnnnnnnnnnnnnnnnnnnnnnnnnnnnnnnnnnnnnnnnnnnnnnnnnnnnnngccagtccaaccattataaactcaaataccacaatcaaaaaccaacttatcatgtatttatgacttccctggtaatgccttaaaggcagattttgctggtgtttcctttccaagaggtttctaggttggttaatatattgaataggcttataaggagagcccaaatgggccacaagtaatacaaaaagaaaataaatagtttgcttttaatttatgataaatacaacaaaaatcaatcccatcatttcccattacacagtgatggacattaaagccccccagcaacgaactcaaacaccacagcccaaaacctgaacaccacagtccatggtaaggcttaggtcaatctcctatccccccctgccccaaacatacacacaagcatgaaaatcaccttgaatcatcatcaagacctttagcgtgccttggccttggagttacacacatgtttggttccaaatttttccaagaaaataatagcttttttttcaaaagttctctacggaagctgacatagggagattatttttttccaaaataaccagaaccaaacacatacattccctcccccttaacttccagtacgtttggaaacacatttcaaacacttcaacccaaaagatatgaaggggttccttccaccaacttaagcacagcaccccaccaacggatttccaaacatacgcttactattaccaagaacaaagagagagagagagagaagagatcatccagtccaaccataataaacttcaacccactaaacagtgatcgagatttgaagtctcttgctcaccaacttaaaaaccacaatccgaaaacaaaatcgtaataaaacagcataggcataaatcgatgtatccgcttataaggtgaaccctatttcgcaaacaggcaacgagtaattagtaataaacaaaataaataaatgcaattatattcgtctcccttccccaattctatttccttccgccaagaattttcgtaatcaaacacagaacgcgatacgattccccactcaagctcgcattttccacgagaccaaacgcgctttccctccagccactaaattccaacttcatttccatttaacttttcattcattacagtaaactcgtcaaaagcgcaaacacaatttccgtaactcaagaaacgcaggataacatcgtcatcataaacccagtttcggcattttgcaatggctaaacctaaaaccaaaactaaaactaaaaccctacctgaattagggaatcgagcttgtgctgaagattccgtttcctctcgttggcttcgtggagggcggaagagagactcgccaaccttgcaagatcgtgctggaagtcgtcccactgaatgaccttcacatgatcaggatcagttgtggtggtccgcaatgacagaatctggcttggttccatcgcggatcgaactcaccatcgtcttcgagtgagtgagtgatcagcgtctcaacctcatcatcgacccctcttctgattttcttgggaaaatgacggcagagaaggaaaatcgcgtcttggtcctcgataatgaatgttgcaaaagttaggctttttttattatgcccgcgaaatagtggacacgtgggaaacatgcgcggtactttttttgcctttgtacatttggtccctcgcgtatttggatttttctagtatcacaaaagtgaggaaatggattctatgcaacggtagggaaagtgattatgaaaaaattcagcattatactcttaaatatattgttcttaacatactttcttttacaaaaaggttttggtttccaaattatttaatttaatttccaaaaaaatttaagttctaattagatcctcaaattcttaaaaatatatcaatttcattatttccatcaaattgatgtcgttaaaattcgatgattttatttaccaatagtgacgattaaaaattatcactatatttttttaaaaaaaaccacagaaaaaatatcagcacttagactcctccctcctccgtccacactctacaatgttcttcccctcagttgcaaactacagaaatgtcactccatttgtgtgcgatcaccatcgatggtacgaggtgcagccagatctcaaccccgaccacaaccactgccaaatcttgtgatttttatggtgcatatcaagcctctttggtgtcatgctccattgcacttcttcacttagtgtatggctggttggtggctttgtgtatgctggtagtggttgtgggtcgtgcaaggtagtttgcagttgtggggacaaattcacgttatattggaggttggtggttagtggcaattggggtggcggcgatgggtcgtagtgattggggtgtgcggtggtgtgttgctcgtttcgaaatattttcatgtttatattgtaaataagaaaaatatatagcggcgatttttaactgttactatttgtaaataaaatcaccattatttcaatgataacgatgtcaacatcattttgacaaaaagtaccatacaaataggataagtatgatacacttgaaggctagcaaaatctctagatgccctagacaactggagtcactggattagcttgcttttgaataaaataaactttgtagtctagtttagaacttagcaacgttttgcaaatattgatgatgttatcaaactcattcaacttcatcttctgacaactgatacttaagactattgttgccaatctatttcgataaccactttattgaaatgcagttcctaagcccactttatcgcatgaagaagagctagtgcttatccttcgtgaatactagacacctagatacaaagttaattatcaacaacatcaatatcaacaactactttaacctaagttaattggggtaagtgatagatgaacctaataataaatacagaaaaattaaaagaaaaaaataagaaaaaaaaaagaaataagataaaagaaaaaataataattatataatagtattttcttacatcctcttcaaatcttagtatctctcgatgacccctgagtgtatgatgaatttcctcttatgagtttcttctagaaaattatactatcagtcaataaagtacaactctattagttcacaagagattgcaaatctttttttaaagttttatttcttttaattaactacctaaggtcgctaccaaatttaacttgtgcaggttcacacttaaagcaatgagagacatccaaattcacacatctaaactcattgtgaaacccaattatactaaggtacattagcctatatccaacaacatccaataactttttccatccaaaatggaggtaactcatctcattcagatatattggcataaatatgttttttagtcactcgaatgtgagtcattttctttttaattcgccaaatttgaagttacttttttagtcctagaatacacaaaatattatttttgtccttgtgtaaaatgtaaaccaaacagaaaataagagactcacattttttgacatgatttggcacggtcaaaatcaagttaataaaaaaatttcaagcaatttatatttttttactaacttgattatggcagtttttaaccaccaaaagtatactttaaaatacaaaacaaaatcaaattttggtgtcaaaagttgtcacaaattgcatttttcttattctatgttaggctcgtgctatacaaaatgactaaaaataacattttatggatttcaaggactaaaaaaatcaactttgaatttgaacgattaaaaaatgacttaactttgaaggactaaaaacacatttaagtcataaatatttcatcctgaatggtaatatccttcatttaattccaagaatttaatgtatatttatcattttttctcaaaaggtaatgactgacccttaaaataacaaaaatatataatttttagtaattatcaattagattctcaattcttatcatgctaaaattctcatcaagaaaaacaacgaacaattggatttcaacacacaaaaaagttcaccttaaaatcctgaaaattcttatgaaaaccttaggagtatgtttggatgagacaatttaaaattctaaagaatttttaattctaagaatttcaaatgcttcaattgaaattttttcattttcaaaatttagtgtttggataaagaaattaaattttttcattttcaaaatttcgtctaattcagaatccgacccacttcgaagtcagcgatcttcacatgcttctgtgagtttatcagtagattcaagggcttgatgtccctaggcacaatgtgctgtcgatgcaggtatatcagtccctgcagaatcttgctaagacaaatctgctaactgttgctcttgcaggaagtgtttcccctccaacgacctttcgtccataaactccagcaacacttggatttcgctattctgatagtatatttcgtggcacttcatcacatttggatcatccacgtcatggaggatctaccactgcactgactcctcgtggtgaccatataagcgcgtacacgcgtccgctggtgtagtggaccatctgagaacgggatcacatgttgcgccgtcactgccgtcaataggggagagtaagtggcactgccaagttggtgtcccgctgcagcaacgtcaggtcctttcgatggcgctggggacgtcagcgacaaaagataatttcaatttctcatgttttagaagaaaattaaaattctacatttttagttatttaaaattatattttaaaatttcaaaaatttcaatttttcatataaaaacataaaaacaatgaattttagattaaaatattttaaattttctaataaattactttcctcacttaaaattctttattcaaatacactttagaggaaattgcattcctcaataaataactaaatgaaaaacaacaattgggttgcacaaaaattccaacattttcttatcaataacccttaataaaatcacatccactaaattcattccatgaaaatttagaaaagatattgttataatcacttcttgaagacctttaattaagctcaaagtttatctaactgctgtgttaggattttttccccaaaaataaaggcttgggcctgagagaaactcattaaggaagttaagagaggttttcagaatggtgaaataagtggtgatgagggttttgattgtctttctcaaagattaaataggtggtgaaataagtgtgtatagattaaaaaaaacttcatttgagctctttctcaaggatggtatttattttcatctgcaacgagattttcatatgcgaaattgaggagtacatttcatatgatcggtagcttttattccaacatatttatcgagcaagcaactcatatgcggactagcttgacaaatcatcatcttttttgcctttgcaaaattgagaattttgtccctaactcatacacatgcttaatcgatgtagcagacatctccatggtgagaatttgacttctcttttctttttcttttcatgttttcctactagtaagaaaacattttagcatgtttccattaaatattggatgggttaataggtgaaccaaaattaatatatatatatatattaaaacagtaggaacagattaaaaaaactatatatatatatatatatattaaaactgtaggaacaaattaaaaaaactaagttactaaattgtgaaataatgttagtaatcacaagggtaatttaagaaggaaaaatagacgataaatacatcaattttctctttataaattagaataaccagtattttagccttgcacatgataaatatttttataatttaaaattataatttataatatttaaatcatattataaataaaatttataaaaaataaatattttttaacatataaattatattttaaatttattataaataatttatattctgacatattgttattattaatcattaataatttcttttaagaaatattcaaaataaagttagaattaaagatttaaaaaataataaattaaaatagataagaaattaaattaaatcgttcagttgatattattgttagaaagatatataaattttgaaaataaaatatatatttgaaattttttaacgtctaaaataattttttaggacgaataataatgataaattaataataatttgttagcggtgttgttgcatctccactttactcctgagaaagcaagggcaagcagtcgtcgtaggtgctgctgattggtcaaaatataaatccaattgttgaaatttgttacttgcactgcgtttgctgcatcagaatcaatggcaggcgtttctctcaagtgcggtgactgcggtgctctgttgagaaccgtagaagaagcgcaagagcacgccgaactcacttcccactccaacttctccgaatccaccgaaccggttctcaacctcgtctgctccgtttgctccaaaccctgccgatccaaaaccgtcagtcccactctctccgatcaacatttcccgattctcattttagggttcaataccgcaatttccttttattaatatattattattattaactgaatatgttactgttggttggatcacgaacataggagagtgatttgcacacgaaaagaaccggccacaccgagttcgttgacaagacttccgaggccgtcaaaccgattagtttggaggctccgaaggtggatgcaactgcttcgtcggaaaacccttccgctgctgcatccactgaccaaagtgaaggtaatttttgtttttaagtttagttaattaaaatttaatattcctaatctatgattgttaatctataaaataaggacgtaattactcgtttggttatcatacctgcataatctttgcagtttagtctctatacctcgaattattcgttttagttccaatacatacactttttaactcttattagttcttacatatacattttttaatctgttttaatccctacgatctttggatgccaggaactaaaactgattaaaaagtgtatgcataaggattaaaactggtagtagttttaggtgtaagaactaaaacggaaagattgtgtaggtatagggaccaaacgaataattaaacctaaaatggtttataagctcagtggttaatggtgatgtagttttattttgtatttttgcctgattgtgatttatgttgtaaactgcagaaatggttgttcccgaagtggacaagaagctgctcgaggaacttgaatccatggggttttcaacagcacgggcaacacgggcgcttcattactctggtgaatttacatgcagtcctattcttttgttattgaccatagttgtgtagtgttctttacgggttcaagatagagatattctcttatttctggattttttttcttcttacttgttttttgctgtctcatgtgagacccttcaggtgagcttactattaggttgacctttggcaccttaattcgggctgttaccatgtattaggttgccaaagttctggtaggctccctgggggtgtttttctttctcagtactacttgtactcatctttattatatatatatatatatatatatatataatattatctttgctgataaaaaaaatgtgagaagaccaatagaggcttgtgtagtttaagtggatcaaacggaggatggtccaagtaaaagaaatagaggaagaaccaatttagtttaccttgccctgaagtgttttattgaaaatatgatttgcaatagagcctaggtctagtgtgttgattgatcgtggagctgatcccacctagtgtgataaggcttgattgttattgtttctttttactttttctgtctgtccaagtgttatcaatggcaaaaggccaaatcctaccatataaacacgcccatggcgccgaaaagcaggcctccctttacaagttgcttatagcggttgccaatctgccatggtgaccatggctgtgccatttaacaacattgttctgtcttgaaaattacgtttttatttttattggatagttcgtggaatagagaactgtagttattaatgcttcatgggacatttatggagtatgttagctgtttcatttatacctaagtaattaccatttgttctaatagtgctttttgtcacaggacattcttggacgttcatgaaatatttttggcgtattttattaaaaaaatattgatatttgtatccattaatcattattgtatcacagagcatctatttttgcttttttgaaggaaactttatgatattgttggaaattagggtgggttaacagagagaagtgagtacaatatagccaggaaagggacttgtttattcaaagtttataatatttatatatgatggcaaatttgatttaaaacttattagacgtaaatcttagtttccttatttacggatgacagtctttggatctaggatacatgagtagtcaatttaaagggtattttcaatacaccattaatgttatttatatctggacattgataattattgagtctctagatattaaacctgggttctcccttctacaggtaatgctggccttgagtctgccgtaaattggatagtagagcatgagaatgatcctgacatagatcagatgcccttggtacaatatttatattttaatatcacttattgtcattatgtgcttaactgcttattacttcatgagtaatagatctgatgttgcaaacttcaacaaaaataagactagttcatattatgaacaaatcttaaaatgcattcagtgtaattaagtcacactctagtttctaacctgctgattaatgattcactcaggtacctgccaacaccaaaattgaggctcctaaaccttcgcttaccccagaagaattgaaggccaaacagcaggaactaaggtataaaactgaattcagataacattcatactaaagggcgaagttatgaagctattttagagttttaatattgttatggacaaagttctagagaataattttagatatgtattgattcatttgatagaagtaatgtatgatgatgacctagggtaatccctattctgctttcacctgacctctaaaggaaacagttgatgcattctggtatttttgtcagtaccataggctgattaagtgaacacctaatattaatatcattgggtattgcaccctgatttataagtcttgaagttgttaactgttagagattagaaatgtgtctgcatatttctttgtcctctatcattgtgtgcaagttatgtacatgccattaatatataacagtattaatgttagccaaattcgtgtcaatgcattgtgttctggccttctgaacttttgctcagttgatattgtcatatgaagtttttgaaaatttgtagtttaatacatgcctacatgtgtccagaactatagtttacgtgtgcttacttttaagccgatttattattactggtatatttgtagtctatgtaatcattgattttttaaactataatctcaagggagagagctcgtaagaagaaagaagaggaagagaagagaatggagagagaaagagaaaaggtatattgcagattcatccatttgattctcacttatttcttgtgactttcattactgatatacacatgtatttaaaatccattatggaagggttccatacttgttgctttgcctcacctggtcaaaggttgaatttcagagcaagatagagtgagcttgttagtgacattgcaagcccaaatgactcttctgaggggcatgttagagatataaaatcatttatgagcctccacttaatagcttaagcttttgggagagttggtcctcagcacatgatgtagtattgcttcaaaaatcaataattttttttgtttgtcaattattgtttttaattatatcaaagtctatattgtaaatgaattgttgttcctgtaacatggtaaagtttaggttgattaaaagtaatagattacctcatctcagtcatctgtgtattagtatattcttgaattgaagttcacgttagtaaatgtaaaaaaaaaataattctaggctgttaatagtattttgggaagttttattgttttcttgttttgtaaattgtatctaaggtggtttgagggttttggtagtagttttatgacccctttgttttagattttggaaaagataaaatgtgcccaggcacagaaaataagatacttttggaagatgcccaacaccagttggggttggtagaagtgtaatccaaagtccaaacaggtccatgctccatagtcttattatagatgtataatgcctgcgttttttaagttgtaacacaactattcaaagcagttttagtgaatctagtttgcattcccctcaattcatattaatcttttcctattagctattttcacatctccttgactcagaccaagaatttcatcacaacctaattcgtgggcgaatcattcaaagtccaattttaactcattactcctgcattgtttaagaattctctctctctctctcttgtggtcttgcccatttgtgtgtccatgaaggtttcatgaattcattggttttgtcaccctggttattatctagtaaaagacaaatcattagagttgatttcacaataacctttaagtatctccaaaggttattgtgaaattaaactattgaaattaattgaactcaatatcagaaatagaagagcctatgcttaaagcctatgtaatttgtttgaagaatctcaagacttcacaaaagatatgctaaaagagggaaaaaagcttcacatataaatcaggtcatctttaattggttattggcttaaaatgttggacatcttttagactaatttttctgctcttatacagtctagttactctgatttgtgtgtgtgttttttcattttatgatattcaagctgtcatgtatctgtactgtgttccaaagtagcaatatctctttagttcaacatcaacatcaacatcaacagcacctttaacccaaattaattggggtcggtggtannnnnnnnnntggcgaggaccctagctcttttttcgatacatccggggtccgatgtaacgcgtcgctatgaagagaacgccccaacgaaatatcataaaggttcatcacataagaatagctaactttttatggccggttcgcaactcctgacgccaaccctcctcctttatcctggcttgggacaggccatgcatgcatacacacataggcggagttagcaatatctctttagttatcttgaaaaattcatgggttaatttttgttgtatatatgttcttaggtcggaccagtttataacattgtaatatagtatttcttgatacttttgtccatatttgttaattactttggatcttcattttcttatctgtcatgtttttaatgcaggagagaattcgcattggcaaggagttgctggaagcaaagcggattgaagaagagaatgagaggaaacggtcgggctaagctagtaaatttgttgtcgcacatcttgtgttttgttttgaatgcactcagctacaagaaaaatttgcttcctcttgcaggttgttggccttgagaaaagcagagaaagaggaagagaaaagggctagggagaaaatcaaacaaaagttggaagaagacaaggttccaacatttcttaaccattttgctctgtcttgttcttttatcgagcctgttcttatctgactcaagagtcagatcatataagtggtttttaattagaattataattagaatatgaatgccaaatgcttaaatctgtgtccctgacctctatttagaattagaatatgaacgccaaatacttaaatctgtgtccctgacctctatttagaattataatatgaacaccaaataccttatgtgcattaaatcctatttttttgccatctggctgtagttggatactgataatactttttgagatttgttttcattttccatcaagatcatttactttgaaaacatagttgtttaacttattctctcagtctctggtaaaagatcacaatacatagaagtgtgggacattaattcaggttgtgtatttaataaagatattgaaagataagccaccatttgctatgcatggttgtctaaaatgaataaaagaccgtactttgggataaaatatatttagatctgatagatttatattgttttgaattggttgacaatattggtttcattttggaactgcattccgcttggcattagcttatttgaattataggttagatcaaaatggtagaattatcctccaacccacaaatcttgtgttctgcaatctgcatatgaatgaattatacttcaaagaagttttgtgaaaaggctaatttctgttttgccaattttattgttttaatggaagaaattaatgatttgggcactgcactaactcggaatatcaagtgcagaacaaaatgttttgtgctcaatgaaagtttccgcaatgcatatttccatatatgttataccagaagaacccatttagaaaatgacagtctacttagtgtcattgctgatcaaattaaatatgcattttgaacaatttttttggcaaagaaaaacaatttttggagcctgctactactacttttatggctgcagtagctttagaggactttagtcccaagtttttaggaagacttgaggagtacgatgagtcttttctttcaaaagatggaatggaaaattgaatatcttttattgggagatttgaatgaagtcaatttgtttctctattatgacaggcagaaagaaggcggagacttggattgcctccagaggaactctcagcagccaaaccttcacctgcacctgttgtggaggagaaaaaggtatgagcttggccaaaaataatggtttcattttttttccccagctacatgcatgcttatttgaaatttgtgcttgcagagttttgtgcctgttaggcctgccacaaaagctgagcaaatgagggagtgcctccgttctctcaagcagaaccacaaggtacattcttggggaactccgggacctgtttagtcgacagtattaataactattcgatagttaatgaaccggtatcaattgaacatctaatggtaatagcataagaggtaccatagcaacctcaatcagttgatgctaaataatatattttattacaaattatgcagatagctttacatccaaaaaagttttgccccttgaatctttctatttaggttcttactgcaagtgcaattgcataacctttttgtgttcatgagggacaactggcctaccttggcttttgaaagaatattacgtttttttcagaagccaagaaaagaattttattatttttatgcttctttaagaaacttcttttagcttcatatattacctttatgcttctcaaaggggtcaatttggttgcattatctttttgaaggaccaaatttatattctcttatcatcaacttcttgatatgatttcaattattttctttttgatttctagtgcttttattttggatggccagagaagtatactgtataccacgtgccatgcaatctggaaaatgaggccatttttttatatacagtagtgataatgttaactgcattttacattctgctaaaggaatttgattacttacctcacatcaatgcttctcaaaaattgcttgttaaaagtatcttctgcttaaatattgtgataccttagcctatttacatgttcacttattcttggagcaggaggatgacgccagagtgaagagagcattccaaactcttctaacttatgtagggaatgttgccagaaatcccgatgaggaaaagttcaggaagatacgtcttagtaaccaatcttttcaggtatatggccccatctttctcttgtctaaacgaaagttgggttttcaatactaacctaccactagatcatttaaatacgatatatttatggtaagtctgtgtttatgttgggtgtgttttacaggacagagttggttccttgagagggggcattgaatttctagaaatttgtgggtttgagaagatcgatggtggtgagtttttgtttttgcctagggacaaagttgaaatggcggtcctgaattcagctggatctgaactagactctgcaataaagaatcccttttttggagttctttagatgaggcaactgttataatcagaggctcgataattgtagtttcttgtttcgaagtctgagtgctaccgtttgtttattaaagagatactctgttatttatttaccttaacttatgctcgaaggtatctatggagagatttgttacttggctgtcataactcataagttaatgaggtttatacaaatttgtttcataacttcatcttatatctaatgatgcatgtgaccgcttaggatttccgaagcagtttaagcagaatttatacaataacttacataaagtttaagcatacatatttttttatttgaaaaaatcaaatcaaaaaatttataatgactttatgcatcttgctcaattaatattcaactaatttgaaagtttagaaaataattaattttttattgatgtattatacaaaagtaatgtattaaattttttgtgagaacnnnnnnnnnnnnnnnnnnnnnnnnnnnnnnnnnnnnnnnnnnnnnnnnnnnnnnnnnnnnnnnnnnnnnnnnnnnnnnnnnnnnnnnnnnnnnaaataatatatttaaagtgcattttttttgtaataaagtgcatgttatttattttattttatatttgttacttttgtttcctcctaaattataaattttataataaattgataaatgaatatcatttgatacttacaataattcgatggattttaaataatcatatagaaaagtccaaaggattggactttgatggtaattcatcaccctttaattgattcctttttttaatattccatcaatatgtataaacaagatggaggaggttgaaatgacatttatcgtggannnnnnnnnntttgtttattaaagagatactctgttatttatttaccttaacttatgctcgaaggtatctatagagagatttgttacttggctgtcataagttaatgaggtctatacaaatttgtttcataacttcatcttatatctaatgatgcatgcgaccgcttaggatttccgaagcagtttaagcagaatttatacaataacttacaaaaagtttaagcatacatatttttttatttgaaaaaatcaaagacaatatcaaaaaatttataataacttatgcatcttgctcagttaatattcaactaatttgaaagtttagaaaataattaattttttattgatgtattttacaaaagtaatgtattaaattttttgtgagaacttaaaaatcaatggtaaaaagttgtaatttttctttcattagtaattagtggtaagacgattttggattataattacataatattttatactaataataaaataaatgatttaaatttaatattaataagaattcaatttcgtaaagattacatgaagtatataaattcattgatcctgtatttggagggttttataattctaaagaatcttaaattgtaagaatttcaaataaaatatattgtttttttctttgaataaagaaattaaattttttcaggaaataatcaaaatatgtctaaaatttctaaatcagaagcattgaattaactgtaatagtctaaatatacaaaagagcatgtctttctcacaccttgaatacttgtcttgtatcatcctttatcttatatcatgcttctcttttacgttctcatcaagatgtgttagcaatagtttatttaatgtttttgctaacaagaaacacactcccaaatgattgtgctataaaaggataatgcaatcgaaagaaaaaactgacatgaaaaaacacaaaaagaaaattatataagctaacgacattgcactatttgtaaaacataataatgtttgcaaggagaacaattaaattgaactattgaattaaatttgagccctatagtaaaggccttgatacaatctagctctgctctttcctgaataaaccatgtttgccatgcttaacttgttcataaccttatacattaaaatagtggcggtgcaagaggtagttgcataaaataaggttataaacaaccaaagggagcctttcaacttctgacaaaactgtaagcctggcccaagatcttacataggctaagagataatgaatataataagagaggaaaaaaaagctaaaaaccatgtggctgttgcttctgaatgtgctctagaactgtcagggaatggagtgctcattccaggagttagtccaccagtgttgcccccaccaaagattggtgatgtggtagacgttggcacatttgggttgttcattggaggggttgtggttggtgtatttggtcctccagcagcactgaacatgatacgaaatcaaattgttaacttttagactccataaagtacaactataatttaagggatcaatgaaaaacattctcatggcttaacacaaaaatcagttcccaaaaactagcctttcactgaataacttgtattttttataaaatgttctttcttgttcttcttcaattgcatgatgcatctcttaagtcttaattcgtcactctccatggagctgaagtaaaagttgtaatagtatattgtaataaccatgtgggtgtgatccccctcaactgatcaaaagcactcacataaaggctcatcatgacacgtgagagggcaaaatatgcctagaactcgactagtatggccccatcattgtccgtggtctctatcagcaattttcttacatgctgagtcataataaatctaaaggggtcaaacacattccaagtaatgatttgatcacaaccagcgtctttattatgtgatcccccccccccccctgttnctccatggagctgaagtaaaagttgtaatagtatattgtaataaccatgtgggtgtgatccccctcaactgatcaaaagcactcacataaaggctcatcatgacacgtgaaagggcaaaataagcctagaactcgactagtatggccccatcattgtccctggtctctatcagcaattttcttacatgctgagtcataataaatctaaagaggtcaaacacattccaagtaatgatttgatcacaaccagggtctttattatgtgatgcccccctgttgtgttcaacaggcatggttcccttattgctatgtctaggtacagcactcttttagcacattaattaagtacatttgcaaatcaaataaacatttatggtgattattcagcactcttttatcgatctaaaaattcctttcatgtaatatatgtcaccctactacagtactaccaaaacggtatcttcaataagatactaaagaaaaagttatgtcaaacccgtttactatgtaccctgtatctacttttttgtctttctttttacaaaacaccgagtaaaatttttacgggcttaattttacgtgattaaaaagtatttgtaaattaatctcaatcatagttttctatattcaaatatgtctcgatgtgtgaaatacaccgaatgctgattaaatatgtaccaattactctttgacataaagttggtgtttctacactgaattataccaaataaagattcaattttttccaattgagtctccatgaactgcactaccacatcccttatgaagtaaaaattcaattatagcttttctttccaacctcaccatcacatgcaaatggatgctattaacttgcaataaagacaaaagcctcagaaacaagaatcagatgaatgaacaaatgaaagaaagttgaaatgtagatgaattgatggatgagaatatttcacccattgatgcaaagtgcgcaactaacaatgctcatatctatggaaatgtggattggatcatggatgggtcaatttcaggattgagaaagaacatctgaagaaggtgctaggtatgtcattttccacagattatttattaatggtaaagaaataacagctgacataaacgtaagcatcaattattactacactacaccgttgcatgacttgcatcagatattcccacaatcacttttaccatgttataaaaaaaaaaaagtatcacacataagacttgtttgggttagattgataatgaaaaataatcaatttaatttttaaatcaaaggcaagaaaaagttatttctactttttcataatctggccgtgattttatggagtaaattgatttttatgagttattcaaatacactaataatgtgtacaaatgatggtcatgattcatgagtgtgaagatcagcaaggtacggttaaggtgaatctaagccgttggatgaagtgggccacacagactcatccaacggtctaatcacaaagtgcagaaaaaagtaaccaacacactctgggagagagcacacagtgtcagtggaccaaaattgagcaacccaagattttgaaaatttgaactttgaagaaccaagaatcagacacagagaacacaaattgcctgtttggttccaatgttgaaattcaattggatccatgttcatatggaagctactttgtttttatacgatttgatgccgaataaaaggatacgcgcacatattttatgcccaaaaaagggtgtataagcatattttcaacacacatccaaacaaacttggtagcgtaagaaatgttaattataaattatatgtcttaattgattttagtttcaaaattttatatgtaaaatatgcgacgccatctgtaagattgatcgaaagaggcacacaaataagggcctgtttacacttaactatgattaaatcttttatttctgaaaaattcaaaccaatgttaccaaaaaactataagtaaaatagtttgggtaattgcagcagataaaagaaagtttgaacagaaaaggaggaaaattacgttacccacccccatgcacagtgacacgcgtcacagaccattcaactcacattcaaacaaacatttcctcttacaaaacaaccatcctctccatcggcgttccttgtcgtctctatcgtattagggacgccatataaaccagacagaagaaaggtaccaaagagaaataaaggtaaaaaaaaaaaaaaaaaaannnnnnnnnnnnnnnnnnnnnnnnnnnnnnnnnnnnnnntcactttcaccaattgtaactgaactctacacaccacactcaataaaataaaactcttcataccatataatattaatatcaataggcgtattagaaacacattccttgtcacacttttattgttagttaaaataataagaaaaacttgatatattaaacaagacttgagatactcaacaaattttagagaataatatcagcatttctttaataaaagtataatattagtaacagagtaaaaccatacagaaaaaggccataccttgcagaagaagggtacacacaagatccatagcctacaaacaccaaaacaaataaaaataaataaaaatgagatgacactgatccactgaaaaacaaaaatggaaatgaagagaaaagttatatatgatactgggatcactggtggcaatggtggcagtgccagcaaaatcacaggagccaggggctcttgccctgcgctgatagtagctgttgaaggcataagaagcatgtgcctgaatggtattagggagaaaacagagtccatctggctgaagaggaagacaatccccaccagccccacatgcatagtccaacgccgtttgaagtgcgtagttgctagcgtcactcctcgccacacaccaactcgcttgacccaacacattcttgcttagacccattgttattatggttattaataacagtaaaggaaccggctttggtgctgccattggagaaagttatattagggagagtgctaggtgtgattgtttgctttgcttagttggtaaaggtggagagagagagagagagagagggaagtgtttagagaaaaaagagaaaattatattatatatggtgactgagtgagtgtggaagagatgggaatagaaggcgctttcgctttctttttggtttctctttttctttttatcagagcatgatagtgtatctcaggtttctatgttctaacgttaatgtctctctgcagtgcactgtgcacgcagtatgaaaatcaaacctcgtttgctagctagcttctgaaatacaattcccacggtctctccttttcttttcttttggtgagaaaaaatacaaataccataacgcccatcctctccctaataaatatttttgaataggcaaaaatggtaacaagtaacttaaggatattagttaaaaaaaatttaaaaatggaagctgaaaaattatgtcgattttttaacatttttttataatttatacaataaatattttttaattctttaattaatgtcttaaaagacatctttttttagtataatacttttacattatcaataataataaaaaattaaatacgttttccctctgaaaaataactgtgttttgtatttttttataaatttatttgacttttgattcttaaaatatttcttccgtgtttgtcccttataaatacttaccttataaatacttaatttacaaatatgtttttatcatgtttttcttttagacaaaatagtctatacatcattaatgtaacagaagtttccagtgtgacttaatcatatttttatgatattttatttttaaaattatcaaaaaagtatatatatatatatatatatgtatatataattgcatacaaggtgtcagttaaatttctgaaagtcgaatttgcttttgtgaaaacaaattttgacgatttttcctgaaaaaaatggtgacattaataagccacaagaaaagtgaaaaaaaaaacatcataaattgatttcacaaaaaggaaagaaagccgacttnnnnnnnnnnnnnnnnnnnnnnnnnnnnnnnnnnnnnnnnnnnnnnnnnnnnnnnnnnnnnnnnnnnnnnnnnnnnnnnnnnnnnnnnnnnnnnnnnnnnnnnnnnnnnnnnnnnnnnnnnnnnnnnnnnnnnnnnnnnnnnnnnnnnnnnnnnnnnnnnnnnnnnnnnnnnnnnnnnnnnnnnnnnnnnnnnnnnnnnnnnnnnnnnnnnnnnnnnnnnnnnnnnnnnnnnnnnnnnnnnnnnnnnnnnnnnnnnnnnnnnnnnnnnnnnnnnnnnnnnnnnnnnnnnnnnnnnnnnnnnnnnnnnnnnnnnnnnnnnnnnnnnnnnnnnnnnnnnnnnnnnnnnnnnnnnnnnnnnnnnnnnnnnnnnnnnnnnnnnnnnnnnnnnnnnnnnnnnnnnnnnnnnnnnnnnnnnnnnnnnnnnnnnnnnnnnnnnnnnnnnnnnnnnnnnnnnnnnnnnnnnnnnnnnnnnnnnnnnnnnnnnnnnnnnnnnnnnnnnnnnnnnnnnnnnnnnnnnnnnnnnnnnnnnnnnnnnnnnnnnnnnnnnnnnnnnnnnnnnnnnnnnnnnnnnnnnnnnnnnnnnnnnnnnnnnnnnnnnnnnnnnnnnnnnnnnnnnnnnnnnnnnnnnnnnnnnnnnnnnnnnnnnnnnnnnnnnnnnttttaatattccatcaatatgtataaacaagatggaggaggttgaaatgacatttatcgtggatattagagaaattatgactaagaacttaaaagagatctccgtgaggttggtgagaatattttttttaatcgataaatgttaatcgttgatttattgttaatagagaagttgaaattgtgatatttttctctttccttttttttcaaccacctaattaaccttatattttttaattgatgagggtgtggaatgtgtaaatcttgtaaataaatgctagcaacatgtttttgcacaaaatgatagtaattgactgaaatgtgtttgaataggaaaaagatttgggtttgcatattaatttaggtgactataatattatcacaaaagattggtgggtccataaaatatccaagccacgacagttcatcagtaatggttaaagcaacggggtgatactagtttgtctacttttatttgatgtgttaaatgaaagactcgtttgattatgagaactaaagcttgtaaaagtaatcgttaaagcaatggggtgaataacaactatatggtctagccctagaactgttaatcttgacaattgctattcaaataaatgattaaattagttattaaaattggtaaaagtttattctgtttagtgtctaatattatgagtttgtaaaattaaatttttggcttgctcaacaatatatcaaaattatgttatcaggctcagatttttttgtgtgattaaataaaatcaagtttcgaaatagtaatatgactttttacatccaaattatctcgcaaagaattaatgtatattcggacaattagaacttagaaactaaggattggcaaaattatttaccaattaattgtattggataatagttaaaaaaataatcacaatattgttgtgaaattgatgatttgaataatcaaagttgaacttgattttttccctttttcaatataataattttaaacaatccagttcatgtaatttatttccaattcacaattatattctaatcctaatatcttaggtggaagaatataagttatttaaattaattcctaatttgtttaaagtgagtatttaaaaacttaaggcattcctcttttctagatggtgtgtaaaaacttagattctagaccaaagagcttgccgtggacatttacatgtgagaatccgaatttgagtttaatttttaaatgttttcatgggccatgtagtagtttctaaaggcccaaagttgttagattaaaagtactattcatggtccaacagaaatatttgacgtttgcagggccggccctgacagggtgaacagggcacctggccagggtctaaaagttttttcacagataatttatataaaatttatttttttaaaaaataaaataaaaataaaatctatgttaggagtccattttatatgttagggtccattttttctatcttttaattttaatattatttttattttaaaaaatttgtatattagagacccatttttttcattccttaattttaatattatttgtatttcaaaaaattcatatgtcaagggtcattttttccatcccttagttttaatattatttgtatttcaaaaaatttatgtcttaggagttcattttttgtgtattagagatctattttttctatccgttaattttaatattatttgtatttcaaaaatttatgtgttaagtattcattttttctatcttttaattttaatattatttatattttaaaaaaaattatattagcgacccagttttttcatttgggccttcagcaacggctttcgatactgatgagacattacttatttcattaagcgatgagtttccctattataaagacctgaacttcaggttcgtaatttacgagtataactcctcagttgtactatatattttgtatgacaattgactgaagtgtaatatatgcatgactgtgctatttgttctagtttataaattcatgtcgtgctactatttgtatttattttgaatttaacttcaattctcttaaaataaatcaacagtaatcaaggccttatataaaggttgaacagagaaagaagacgttctatgtttgatttttttttattagtaaaaactaattaatattgactgataaaaaaagtcaaacgataattatctcaactaaaatttatttattttatttgtcagattttttctttgaaagttaattctggttgaattcttcctatcaaattatttattatattataaatataccaattatttagtattaattataaaatttaaaatatttaataaagtatattaaattatttatgaactatactacttattctgctattcacaactttgcttaccttatttttgacttcagttcgtgcttgtaaataactaaaattaataaatttaaagggacattgttgttttgtacaattgcaattgaatttctcactttttttttatacaaaagttaagttataaataactgtccttttcaattctttaaaatgcttatgtcagctacggtcaatctttgatttttttttaatagagaaactttaataatgaattctttgacatttattattgagtgaactaaatgtaaatgtcattaacagttacttaataaaaatatataaaatacattctgaacatttaatgttcaacaagttaactgaataattatagaggtacctagtcgcctcggacatttacttgtggagtttcttgttgaccccctatccttcggcgaaaaatctgcacaattgccttttttttttccggttcctttaccacattcttccatcatagtgaacttggatcccacttggaagcataaatgacttgaataaattttgaattagattatggattctcttatttaagttttctaagaatgtataaaaaaagtgatttattatttagatattttataaaaaaaaaagcagaagttgcattttgtttaagtcataattataacaaattgttttagttttaaaatatatgacttgttaattaagcacctaattagtacgtgtttctcatgcaagcattcatgcatgttactaagttgtctttataatcgaaaggggaaactaagttaaattattttcatgtaagttataagttagtttcataaactatatatatatatatatatatatatgtatatattatactaatgaacttattaaaataaaccgaaacaaagtataaataaatacatctttatttatttatataaattctcttaataaaaaattttgtatcataaaataacaggttgataatttctctgttgttattgagattagcttgggcagtattcaatcctccttgttggtctggtcttgtaatatcttgctgttcattggaagccccgtgagtgttgtatcaactcctccatcagtgctgaaaattaaaaggaagaaactctttgtcatcattcataaataaaatgagtgacaagagatagcaggaaaaactacataaatttgagaaggaaaattcatttaatccaagaccgacgagcagaattaaacggtttgaccaatttaaaaaacaacattacaagaaaagaaagaaaataggccatatatatatatatatatataccttgaagaaggtgggtacacacaacgtccaaagcctaaacacatgaaaacaaagcagaaagaaacaacatatggttaatcaatgattttcacacataaataagagagaaaagagaagatatgtacatactgggatcagaaacggcaatggtggctgcaccaccaaaattacatgcaccagggtttttgccatttctctgatagtaacagtcaaaggcataagaagcatggttttgaatggtgttcggattgaagcaactgccaccgggttgaattgctctgcagtcagctccatgtgagcatgcaaagtctaaccctgacttcagtgctccgtagccagcgttgctccttgccacgcaccaagtgtttgcttccacaatattcatcatcatgctccctactactattaacactagagaaaccacttttgctgttgatgatgatgatgctgccattgaacaaattactcttattaatttgcttattggtataaagaacaagtgttcagcacagaagaatttatagtggctgtgaacactggtccaagtcaatcacccataaatatgcatattattttaattagagaaacgctcctaacattaatcacttttcttattcttatttttcttggtgatagccgtgccaaaattttgtcttccaacatttaatacggttacatatttaaaaatttaaattccaagaccaatgagttatgtttgaacaatccactcaattgatgtatgcgtttgatggtactaatactcctcttataataataataattatattttgtcagatatttaaaaaatcatttctggtgttttatataaaaaaataattaattcattcattaaaattagtaaaataatcaaattagttgatcttaattttttttaaaaagttgattttaattaagacttacaaatttacattttattttagaaattttcattaatttaatgatttaagtaatcgttatattaaatgatgttgcttataattcaaaagttattttttttcaataaatacgactttttattgttaataaattaattaacgcatttattcacttaaaataaagaatgggtgaattttatatcaataaattttacaataaagaatggttgcatttatttcactagcatttcttatatgtaatttccgttataactgtccttcttaattctttataaccgtttggtttgtaatgtcaaccggtcaaccttgatttttcatgaatatattaagaatatactagtattttaatacttatactcttaaataaattttatataattaaaacttaaaaaattaaaatttcccaaataacaaaaatacattaaaaaaatgtcatgtaaccataattgttgcatcacatctaagagcatctttagtacaagatgttgaacaagaatcttgagttactatatcttccaataaagaaaataaataaatctctaatataaagaacgagtttttgtgaaaaaattcttgttcaaaaaagaataatttttattcttcttcctaagatctcaaagtgagatcgatctatcataacaaaaatagaaaaaacacttataaatctttaatttttttacatgacactatcacactatcatatgtatgaaaaataatataaaattttaatttagaatttaccactataaaaattaaaaatgctccaaattacctcagacatttgactcggcctctcttttacctcctcctgctgcctttactcaatttgcatttcctatttccagcttgagttgcataaaataaatgaactttagatatattagttttatttatctcaattaaatgagcaccgacttttttatgttcagtccagacgttcagttactctaccaaatatttaagccattcatgtccttttaaaaaaaaaaattaattattttgttatctctatatgatctatacaatatttgttttagtcccaatacataaaaacaactcgttaaatacaatgtaacatcgttaacagtgtgacaatgtagtgttgacatacatgtttgtgttttatggtttagtttctgaactatttttatgtttcatctctacttgcacaatttttatgttttaattcctatatgatctcttcttgctcctcctacttcccttcctctctatttccttttttatttcccttaacatttccttttatatattttgcggtttcgatttcttttaaatacgtttattgttttacatcaactaatttgttgactctaaatcagagtctcaaggacgtagagttcaaatgcacttttgggataagacgaggtaaccaagcgtagcaattggttcaaacattccttacaataatagtgacttgctacattagtttaatcttgttgcgtcaaacacttaaaaacatgtaggttgccagttaatttgttttctagatcacatattagcataaggaaaatggatgctcattgacatgaaatgatgaatgaaatgcttggtttgtaggttggtttctatggacaaaaatgtaaggtgaaagcatagggactaaaacctaaaaataatgtattgtgtaggtgtagggattaaaacataaaaattagtagtgtaagtataaggactaaaacgtatcgtgcaaacaccttaaagtcaatgtcatattaatgttttagacaacatgatgcaacatatcatgttgttaacgacattaaattgtatttaacaataaaaactataaagcaaaatttttgtttacacatgaacttaaatgagtaattttcaagtgtaaaaagtaaaacgtaaaaattgtgtaaatataaagactatgtaattaaatctaaaaaaatgctcaacatgacatcatgtcaactaaatattattttatatattaaatttttaatgattgttttcatgtaagtgatatatttttattgatttttttaatatatatagattcatatgatatattacatttattaaatctaataattacattatatttagtaaatataaaatttaatactattattgatgttagttattaataaaatatttaataaatacaataattattactataaaagaaaaaaaatcagttttaaaaaagttttattaggtaatttttaagtaaaataaaaaatacttaatattttaatatatatatatatatatttaattaacatttattatatcattaaatgtaataaattttttataacaatgcttttaatgtttagtatatataatatttaataatattgtaatcaatacactgtaagagaaaatctatttatttatatgtctatttaaattatacattaataacatttaannnnnnnnnnnnnnnnnnnnnnnnnnnnnnnnnnnnnnnnnnnnnnnnnnnnnnnnnnnnnnnnnnnnnnnnnnnnnnnnnnnnnnnnnnnnnnnnnnnnnnnnnnnnnttcaaatcttattaagtcattcttattttatcatttttttaaaaaatcatgacttctaaacttttaaaattatttttatcaaaattaccataaattttcaatatttggatagaaaataagatttaaaaaaattggtaagaggatcatatgtgtttaatttaaagaaacaacgagttttactttaatttttttctaaaaaataaaattacttctacttaaaattaaagagatcaaaaaatgaatggataaatagttgtctgcttgtcttttatcagttgttattattgagagcttttctagtggaaatataatactttttttnnnnnnnnnnacaatgcttttaatgtttagtatatataatatttaataatattgtaatcaatacactgtaagaaaaaatctatttatttatatgtctatttaaattatacattaataacatttaatattatattaatgtttatgttcaagttgatttttttgtatatataaatataaataaaggtagtatgctgtcaataataaaaagggtagtttatagaaaataattctatttgatttgagtatatctattatgagttataagaattatctaagtagttaacaaactatatatttagtatttgaacttgatatcactcattaaattgaaaaattctccactaaccaatcgatgcatttaatagttgacttaaagcatttgcattaattggaaggattttgttgctacatttaaacaaaatctgattttatcccaaagtaggcgctcaaagttagtgaattgccatctacagcctttcttaatgtaaatccttgatcacatcactgcttataaaagcagaagtaaagaaacaaaaaatataaaagtagaagttattgactaatcttggcgaaaactatggctaaaattgtttgtcttcgatatgcctttcttctcatcctccccatggcttctgtgatccaaattgtttcggtgagtttctctgcgctttcctgcgtcatatatgtataattatatatttcttgccccttatgattaacttttctttttccattgcatataattatctattatatatatatatatacacacacgtaggtataaaaatttacttatcaatttcatgctcaaattattttaaatagttatatttagttctcaaattttaaaaatttaaaaatgttcaatttaatctttaaattcttaaaaatgaatggttccaaattttttaaattaatcaatttgagtctcaaatttttgaaaataaatcaatttgattattaaattttaaataacttgaggatcaaattaaattatttaaaataatttgaaaattaaattaattatttttaaaattttgggatcaaattagtttatttttaaaaatttaaaaatcaaattaaattatttaaaataatttaaaaatcaaattgataattaagttacatataaatgttgacacatgagagttataaaattaatttgatagtaaaaagaagaaaaagaaaaaatcatggattttattcacggactaacaattaacaacattataaaaagatgttgacccctggattcatcattttgatgtctatgaatccttttgtcttttgactatttttttaaaatccacaggctggtggggaaggatcactccctctcgaaggtactagttaaaaattacttctttaaatgtaaacatttttatagcttaactagatgaaaaaaaaaaaaagaagaggaaattaaaagattaatatataatctggttgaggtgatcatgactgaaatcttgattacattgtgcagaatgcggaaatgcatgtgaatatcgttgctcagagactcatcacaggaagccatgtctgttcttctgcaacaagtgctgtaagacatgtttgtgtgtcccatcaggaacctatggtcataaggaagaatgtgcatgctatgacaattggaaaaccaaggaaggaaaacccaagtgcccttaatttgagatccttcatatttacatgtttatcatttatcaactcaattgcacgattgatgtatttctctgttttctacttttctatatctaataagattttactgaggccttaatggcctcatgatgagttactatattattgcgactcttcatattgaaaaaaaaatggtattatatctcaaaaaatgtataaattaaggttaatatgcattatcaaccaacgataattaaaagggtcttgtggcgaggaatagagaatatgttgctgtgttctggagggtccgtttatgtttatatatgtatatgtgtgtgtgtacactcaaatgctgtaaatagttatgggctaacaaaccgcaaaactcaattgtatcttcttactaaccattaaagttgtaatgtttataaataggagaatgctaacaaatgttcaaagatactaatggtccatttcaagatggtaaaaagaaaaaggggtaaacattgagaaccttatagtcagggccggtcctgaaaattttttgatccaaagcgaagtagaaaaaatgggctcctaccacacattttttttttgaaatacaaataatattaaaactaagggatggaaaaaagggcccttaacacacaaattttttgaaattcaaataataataaaattaagagatggaaaaaatgggcccttgacacacaaattttttgaaatacaagtaatattaaaactagggatgaaaaaaatgagtctctaacacataaaaaatggatctctaacatacaaattttttgaaatacaaataatattaaaattaacaaatgaaaaaaaatgggcccctgacacataaattttttgaaatacaaataatattaaaactaagggattaaaaaaatgggcctctaatacacaaattttttgaaatacaaataatattaaaattaagagatgaaaaaatggatccctaacacacaaaatgaacccctaacatagattttatttttaatttatttttattttatttttttaataaaattttttacttaaattactggcccaaaaatttttggaccctgggcggaggccccgctggccctgccccaggatcgggccttcttatagcattgtattctagttgctctataacattgtttgtacaagaaaaaggagtaaacccatcgagagactatcaatgatgccattggcaattgatgaagctgaaatagagagactccataatctaagattagcattgcttttacaagaaaaaggagtaaacccattgagaggctcaatcattgatgcaaactagaactcgtgattgcccattcaaaccaaagcaaacatagagcgaaagcaaaactaaataaacaaattaaagagaagcacaaagttttgaagagaatccagaaggcaattttcaaactcagcctaatgtttttctacagaatcaaatctcttgcgtaatcaattgatgcagtagcttcatcaggcaccactatcttaatcctgaaaagagcacgccccaaacaaataactgagtaacattttgatttctattcaacaactgaacaacattttgttgctagttattagtaataaggaaaaaagtgcttgcaactggactacctcttgcaactaacacttaccaagaaccttcacatggaagctataaccagttcacatacaagccacatttttgttggagtaacatacataatatgaatgtataattgttgacccctagatgcatcattaactttaacgtctatttaattcatttttctttgttttttttattttttaaataatccacaggctggtggggcgggatcacttcgtcctgaaggtacttgttcaaaacttatttaaatttaaactttttatagatgaaaagaacgaggaaaaagattaatgtattgattggtcacaactaaaatcttgatgacatcattaattgtgcagaatgtggaaatgcatgtgcctatcgttgctcagtgactcaacacaagtgttgtaatacatgtttatgccatcaggaacctatggtcacaaggaggaatatccatgctataacaattggaaaaccaaggaaggaaatcccaagtgcccttaatttaagatccttcatatttacatgcttatcaattttatttcattcatgtatttctctgttttctacggtcgattctaacatgaatcaccccatttacggactcatcgatgaaccacccatttttacctacaatagcaggtcatttaccggaaggaaaacaaaaaaaaaattggcaacacaaaaaaaaaaggttcatgagcgaaagaaaatataataataaaaaaatcgaaaaatttaatataattcaataaatttatcattttctctctcctccccgttgtgcttcttccccgacaccggcctccatctcttctgggtagatcaggatcttgttgtgctttgttctacatggcttgtttggattttgattgagaaagctcttgattttaattttaatttttttaagttgttccttatcggattttggttgtttgtaaactctatgctctggttttgagagctaccagtgtgtctttttaacctttttttttttgcttcatttcttggtttctgaaatgtttttcaactggcttggtggcctacaacatgaagggataaggcagcaccttaagctttgcagatgttcgttggaaccaaagttgttgggagggcttgatcaaatcataaccaaaaatagtagtagaaaattgggaataatctccactatcgacaaagtacaggttgagcactgatttatttcaaaatcagtgtcttctactcctccaacatccaagttatagttcccaaaaccattaattatatgaacttctagaagattgaatttagataaggtgttttttcatcttaacaatacggttcatcacccctgccctagagagggttccttcctggtcatggtttctgaaaacagccacccaaggaatttttgatgcaattgtaggagcatatgcagcatccaatgatttagctgaatccggggaatcaaagccaaatatattatctgctattcgcaggcgacaccttttcgcagccctcgttgaaggagaaattggagtcgcaggaaccgccgaacaatttaaaaaaattaatggtcatttttaagtaaaaataggttattaaaatttaaaaacaggttattttttatgttcattttttcaaattaattttaattggacttgcaggtttttgttaatggtcattttcgatgaaaacagtgagtcctgcaaggttggtagtgggagttgcaaaagaacgaagacaatcttgatgtaagggtcaaatagaaaagaaagaaaaaaattaacaaaatccgttgtaacatatgaaaaagggggatgcgtcaagtaaccggttacgactttaaagtcgtaaagcaccatccgactttaaagtcgtaagcttgtttttttaactttgttatatattacgtaattttattaatattaaattttaaatatttttaaaaaatatataaatatattttttttgttaataaattttttaattgaatattatttataaaataattatttaataaatttaatataaagaaaagatggtttcaattaattgacaaattatattatatcattaaattatattatattttaagtatttttaaaaaatctataattattttatattgtgttaattatttttttaatttaaaaatatttatagtttgtttttaaataatttatttttatgatttttttatataaattttattttttgatttaatgaatttaatattattattttatatattataataattaaatttaaatgttatttatgaaagtgctaccctaagttaactccaaatgaaacaatttaagattattattaatccatcggcatttacgtttactcgtaatttaattttttatcattaaaaattataaatggtttatcggttcagcaagtaatcagtttgtaatttgaaacctgcaacctattcactcggtaatatttgtctattaaaatattatatattttttttggtgttatcaatttttttttgtttttcttccaataaatgacctgctattatagataaaaatagataattcattgataagtccgtaaatgggataattcatgctagacgccaccgttttctacatctaattagattttacgtactgtggccttcttgattgcctcatgatgagttactattcacaatagattaatgtgactcttcgacccaacctacaacatcacctcctcctgcgtcttcaaaacctcgtggatctcctgaggtttccattttcatctcacatttataatataaaattttcttatcaatctttaaataaaatattcatatatatatatatatatatattttaagaaataactaattttaaatatttcaacacagattataaataaattatttgatgtcacagtatattcctaatcagcggttagaggaagtcgtcatgaacgtagtagaacacgaacattttaaaattaaaaagtcttcgtggagaccaaggaaagactagatttagaattgtgaagattaaaaatcaatgagagattaatgtgtctttttaaaatatattaaataaaaataaaaatatcaaatttacaaaatgatctttagactttcattgtaaaaaacaaaaaattaaattaattaataatatgatatgacaaaataagtaaattaactaccatatcaagaactgaataatttttccttgtctatatacacacaaatggtgtgtatatttatagctaacaaactgtaaaatggaagttaaaagattaaatttgaatagtatagtcatgcataaaggattaaaatttaacataaaaaattatataactttttaagtgatcatataacgttaaattttaattattcatatttaattatattgtttaaatttaattttttcacttttatataaaatatcttcttttcatgatatttttttattgtatatataattcaaacttgaaatcatttatttatcagtttgattgagtttcgacgaatcagttcttatcaagttacttctcatgacaaccatgcaaactttcccatcacaagaactttattttggttgggtcattgaagatgatgttaaggacagatttttttggacattgcttctctcaatactatgccagtataccatcacctccttcaacgccctaattggcaagtccccttctaacatcaaatttaaccaacagcacttttggatagaggattagaggctaaggtgatggtgattcaaatcttgatttgtgcactctatatgctttaataatgatagacgtgagaggcgagttgagaacgttccaaggcaataatgatgcggatagggccattattatagaaacgactacttgcgcacttgatcggtgggtctaaatgagttaactttagtcaaattgacctcttaaaatttaagtttgatttataaaaaaagattaatcaagtttaatttatttatttagataaatctaattaaaaatttggactttatttattaaaaaagaataaagtttgaatttgacttgttaagctcatgtaaaatttaattatttttaatttgtaaaaaataatttttttaaacattatcaagttaatatttaataaattattttaataataattgtgtaaaaaaataacaatatatattaatctacgaatttaataatatacattaaacatgtgatatgatattttgaaatatatataattttaattttctctttatatataaacaaactattaatattgaacttgtaaaatttgaacttgactcatttaaataatcaagtataattttaagtttgaatttatttaattaattaaataagcttgatcaaatattttacaagtgaaactcaaataattcacaaataatttaactcatttacattttattagtcacaaaaaatttccaatcccgacagatcaatcacaagtaacaacaatgtttttctacatggactttgctagttgttgttttgcagttgtttggcatacttcttttatcatcattttcaagtttccaactttcacttggaataattattatcaaaattaataaatttactatacatagttatttgtaattaaataaaaatgtaaaaatattttaagtttcatgtcttattttttttttaaaaaaaaaaactactataaaaagtaagtttaacccatgaacatccatttccaatttatatttattcactagctcttaaaataaaattcttcatcgccagcaattagctcttatcccttggtgtggtgtcaaagggcgagttcctttcttgttttgcccaaaaaattgttagaattctgttaatcctaatttatagactaatatttttttattaaagataagataaatagtggttataatgtttttaggctctaaaggacttttattccataaaaattaatataaaatcctaaattcggcattggtatttgtttttcccccgactcagttatggttatttctttctcattatgaacgatgatagatagatttatatttatatcagtcattgccgtaatcgtctgatttcaattaaacaccccacctaccttcttttcatgatcatctaatctccatgacatccatccccgagctaaagatgtgcacacctaacaccttcttctattcggctggcctttttcatagtagaaaacatttcactgattccgtcgtttgatttctctggaaagttctttatttgtgtttagtactagttactactatggtcagaaaattactccgtagagtaaaatcaatatttctatttgtatttttgtatgcatattgaatggaaactcttgaaaatatttcactttacgaaatgtaattgattttttttcttactgctgactgtctaaacgattaacaatgttaaaattaaataaattggctaatcaaaattaaactattttcacaatttaattatttgtttattacataacagtatttttattttatatatattcatttaaatacatttacggtactttaaccgatttagccagccacccgctcttcaaccaatgaaactagcttaacactcaaccaaatggattatagaacccaattcaataaaactagtttaatgccaccattgcatatcagcatacgattactgtatcctccgggtcagattatattttgatccttacactcttaagcctctacgaatcatatacttgaaattaggagattatatattctttaattagttcatatttcaatccttatactcttaatttctacacaccttttgtttgaggttgaggattatgtattctttggatcgaatcgtattttgatccttgcatgatcttattaatcgagtattaacgagatcactacctataatatcaatcaattaactgataaacataatcatgcacctacattattggaatatgacaaaatattttgatatgtcataatgtttggtcaacaaatattggaggatcgtgcttgacaaacaagattaaatagtcttctttttttttttatcttaaacaataaattaaataatatattttactaaatattttgaattaggtcttctcttttatgagaaaatcttttgtgaaacgattagcaacactatcactagttttgtgattagtgagaccaagtcaccacccacgttactcaaaactactccttaatcagcaatcaccgcctaattacccccatcgacattgttgtcgcgccatagttaattaccaccactctaccaacttgagtatgaagaagatctgagcacatattttgtataaataaatatttttagtgtaattaaatgttaatttagttataccggccagcaaacgatatggtgcaactttaattattattactattactattttttatatcatatttcatcttatcatgtaggagtgtattctatttttatttttttgtacttttttacttaaagttggcattgaacccgatcaaagttgaatttattagaagaaactaatcttcacaaaaataatatataaagagagtttaattttgataaataaaattacactctgaataaattaaaatttaatctagatataatttttaaattaattaaaatcaataatcttgctatatttatttggtaaaaaccacacatttcacaaataacaattttgcttaagttgaatatacaatcacgaactataaaatttttactctaaatatttattgtcgttatatgctcatgattcaaattcaaaactactaataaacttaaactaaatttatatcaattgattgacatgttttgtgatatataatttagaagaaaaaattagaggaaaatgttggatattcatcgtataaactaatttacacataagtgaatagacatttgatataattaagttaaaccgaatagatgatcaaatgataaaactgaaagaatttgatcagatgattttttactttaaaatctatctaatccagatcgcgaatacccaacgtcagtcaacctagtaatacagacaaatcatcttccaaaggaacatatacccactaatactaaatatttcgtatttcaattcggataaattataatgacaaacaatttaaaaaattatagataaaaatgaaaataataaaattataaagagaatatgtgtaatgtattgaatattagcctaatattataatcataattaagttcctttagtcaaaaacatctttcactggtgatgatgacgaggaatgacttcagttagactcgaaagaatactgagaatttgagatgctttagttgcacattaatttggtctcagctagcttctaacgcagacctttactcctttcacgaatttattgagtttaaatttatttattgtgtaatatttattctattttgagtctaatgctgcattgttgctttcttatttaatacgagtatttactaagttttcaatgctccaaaattttaaggtacagtaacattttgtatcttttcttattattcatttaatacttttctttaacataactgattagcttttacgtcgaaatatttaaagaatcaaaatattttcaccaatatctcaattaattaagacctataaaaaaaataagaaatgcgtcaaatttagtaattcctacaaactaaaaaataaacgttgaaagagtcattcaactcagattgaaattgaatttaattttttttataaaaaaaatcacttttaattatagaaaatcttaaaaaaatattgcaagtgtttaatttctaactaggtttgaattcctttattaataatcttagttatatgggtgttagtacagagtgcaaacttacattgaactttgttaaaattgtaaatgnnnnnnnnnnnnnnnnnnnnnnnnnnnnnnnnnnnnnnnnnnnnnnnnnnnnnnnnnnnnnnnnnnnnnnnnnnnnnnnnnnnnnnnnnnnnnnnnnnnnnnnnnnnnnnnnnnnnnnnnnnnnnnnnnnnnnnnnnnnnnnnnnnnnnnnnnnnnnnnnnnnnnnnnnnnnnnnnnnnnnnnnnnnnnnnnnnnnnnnnnnnnnnnnnnnnnnnnnnnnnnnnnnnnnnnnnnnnnnnnnnnnnnnnnnnnnnnnnnnnnnnnnnnnnnnnnnnnnnnnnnnnnnnnnnnnnnnnnnnnnnnnnnnnnnnnnnnnnnnnnnnnnnnnnnnnnnnnnnnnnnnnnnnnnnnnnnnnnnnnnnnnnnnnnnnnnnnnnnnnnnnnnnnnnnnnnnnnnnnnnnnnnnnnnnnnnnnnnnnnnnnnnnnnnnnnnnnnnnnnnnnnnnnnnnnnnnnnnnnnnnnnnnnnnnnnnnnnnnnnnnnnnnnnnnnnnnnnnnnnnnnnnnnnnnnnnnnnnnnnnnnnnnnnnnnnnnnnnnnnnnnnnnnnnnnnnnnnnnnnnnnnnnnnnnnnnnnnnnnnnnnnnnnngcttgtcttttatcagttgttattattgagagcttttctagtggaaatataatactttttttagtagataagctttcaaaagtacttctaatcttgtatccaaatagatccaatgactattacttcttcacaaaagctaaaaaaaaaaagtataacaaataagtctttttgcattaattaaatgaattaaaagaggataaatatacaattaaagaaaaaaggtgcaaacaaatgtggttatggacgtgcaataaggttcataagtggcaggcaagcaaagcaaagcaaataagtctttttgcattaattaaatgaattaaaagaggataaatatacaattaaagaaaaaaggtgcaaacaaatgtggttatggacgtgcaataaggttcataagtggcaagcaagcaaagcaaagcactagaaactaggaacagagaagaactcagttgccaaactatttttctctctcctttctttgtgcaactccaaaatgcgttccataggggcaaaaaatctagcactctcctcagccttgttgctccttttggtcgattttgcaacctcagacatcaaccgagacaaagcagaatgtaccgacaaacttcttggtctagctggttgtcttccctatgtcggtggtgaagccaaagtccccaccatggattgttgctctggtatcaaagaggttattgggaagagcaagaggtgcctctgcatcctcatcaaggatcgtgatgacccgagtcttggcctcaagatcaacgtcacccttgctctaaatttaccagatgcttgtaaaacacccaccaatataactcagtgtgtcggtaagtgtgtaactatacggtgtgtgtttggatacggcataaaatcgattttgggggccaaaaacagtggtgtgacggtgaattttgagaaacaactatgtgttattgtggctcgatcctgagattggccacgatttttttcacggtgccgccactccaaacacgcacataatctatttatgacacttattttgttacctttatgttgtgccggtacccaattttgatgttttatatgttgttttcagatcttttgcatttggcacctaactccacggaagctaaggtgtttgaggggtttgaaaaagccttgaccaacaaaactagtccctcctcagtccctagtggtaaatattgttgattaatttttattatacgtaattccactttttattcattcctttaactatcctggaatttgttgtccgcatcagggttttaaatcatgatttgtggctgtggttttggctcatttcatatgcatacaaagaaaaattgatgttattgtcaaaattattcatattttttttcttcaatgagtctaattcaataggttgaatgaatgggtgtgagtaattgtgaactcactgatattggtattttcaattctgttaattgggtctcagaatgaattatagaatctaatttacacgattgaaaatacgaggaaattaattatagaattgtgacggttaagagaccaaaatataattgtagtctctgattttgaactgaaaattgactgcagctaatagcgcgactgcaaagggaacaagcacaagcacgaacaacaacagcggtggtgggtggggaaagaggtggttggtgacagaggtgctttgtgggattttaccgtttgttttcatttctcatttgttcctcttcgtagtttgaaccgagatcaagagtagtaggatgttttggtggttgtgtctatttatttctcggattcatcgcatgttctgcatgtaagtatatgttatgcaatttgtgatttatttttactaggttgtactgtctttttcctttagttatttttgcctcagtgtgtgcccatcctccgttgtctgcgtgattaataatccaactaattgaaaccattgaaggggacccgttacttgacctcaacaatgtgtatgctttaaatatcattgtgctaggaccctctatttacacttgctattacgtaattggttggatcgatgttgacatcttttctaagtgttcatttatttaatagtaccaaaatgagacatttattacgggtttatagcaactgtaatcaactgaactattgattgacataaaaacaacttagaccatcttcaaacgtccgtgtttaaatgagatgtttaaagttaagaaatattacttaatgtaacacccccgtgtatacccggtgtattaacattgtataatcatcagattagcgcttaagcaagataattaaaacctttttaaaacatgtttatattgcggaagcataaaaccaaaccatctctcttgataacattatgtatggagacaaaacccacatcaagtataaccatgccccctgctcaaccagatcatacaaccaaccataggcagataacataaatatctcaaagatataaacatacaggagtaagcataactgaacgaaaaccgtatatatatatatatatacatataaccaagttatatacaacatctgatcccgaggatccttcctcacatgagagggtatacaaaatatacatcaacagtgtataatacaaaacacatgcgcaacgcatgtcttccctcaaaggggtatacatcaaaaataaacaaaatgctgagcnnnnnnnnnnnnnnnnnnnnnnnnnnnnnnnnnnnnnnnnnnnnnnnnnnnnnnnnnnnnnnnnnnnnnnnnnnnnnnnnnnnnnnnnnnnnnnnnnnnnnnnnnnnnnnnnnnnnnnnnnnnnnnnnnnnnnnnnnnnnnnnnnnnnnnnnnnnnnnnnnnnnnnnnnnnnnnnnnnnnnnnnnnnnnnnnnnnnnnnnnnnnnnnnnnnnnnnnnnnnnnnnnnnnnnnnnnnnnnnnnnnnnnnnnnnnnnnnnnnnnnnnnnnnnnnnnnnnnnnnnnnnnnnnnnnnnnnnnnnnnnnnnnnnnnnnnnnnnnnnnnnnnnnnnnnnnnnnnnnnnnnnnnnnnnnnnnnnnnnnnnnnnnnnnnnnnnnnnnnnnnnnnnnnnnnnnnnnnnnnnnnnnnnnnnnnnnnnnnnnnnnnnnnnnnnnnnnnnnnnnnnnnnnnnnnnnnnnnnnnnnnnnnnnnnnnnnnnnnnnnnnnnnnnnnnnnnnnnnnnnnnnnnnnnnnnnnnnnnnnnnnnnnnnnnnnnnnnnnnnnnnnnnnnnnnnnnnnnnnnnnnnnnnnnnnnnnnnnnnnnnnnnnnnnnnnnnnnnnnnnnnnnnnnnnnnnnnnnnnnnnnnnnnnnnnnnnnnnnnnnnnnnnnnnnnnnnnnnnnnnnnnnnnnnnnnnnnnnnnnnnnnnnnnnnnnnnnnnnnnnnnnnnnnnnnnnnnnnnnnnnnnnnnnnnnnnnnnnnnnnnnnnnnnnnnnnnnnnnnnnnnnnnnnnnnnnnnnnnnnnnnnnnnnnnnnnnnnnnnnnnnnnnnnnnnnnnnnnnnnnnnnnnnnnnnnnnnnnnnnnnnnnnnnnnnnnnnnnnnnnnnnnnnnnnnnnnnnnnnnnnnnnnnnnnnnnnnnnnnnnnnnnnnnnnnnnnnnnnnnnnnnnnnnnnnnnnnnnnnnnnnnnnnnnnnnnnnnnnnnnnnnnnnnnnnnnnnnnnnnnnnnnnnnnnnnnnnnnnnnnnnnnnnnnnnnnnnnnnnnnnnnnnnnnnnnnnnnnnnnnnnnnnnnnnnnnnnnnnnnnnnnnnnnnnnnnnnnnnnnnnnnnnnnnnnnnnnnnnnnnnnnnnnnnnnnnnnnnnnnnnnnnnnnnnnnnnnnnnnnnnnnnnnnnnnnnnnnnnnnnnnnnnnnnnnnnnnnnnnnnnnnnnnnnnnnnnnnnnnnnnnnnnnnnnnnnnnnnnnnnnnnnnnnnnnnnnnnnnnnnnnnnnnnnnnnnnnnnnnnnnnnnnnnnnnnnnnnnnnnnnnnnnnnnnnnnnnnnnnnnnnnnnnnnnnnnnnnnnnnnnnnnnnnnnnnnnnnnnnnnnnnnnnnnnnnnnnnnnnnnnnnnnnnnnnnnnnnnnnnnnnnnnnnnnnnnnnnnnnnnnnnnnnnnnnnnnnnnnnnnnnnnnnnnnnnnnnnnnnnnnnnnnnnnnnnnnnnnnnnnnnnnnnnnnnnnnnnnnnnnnnnnnnnnnnnnnnnnnnnnnnnnnnnnnnnnnnnnnnnnnnnnnnnnnnnnnnnnnnnnnnnnnnnnnnnnnnnnnnnnnnnnnnnnnnnnnnnnnnnnnnnnnnnnnnnnnnnnnnnnnnnnnnnnnnnnnnnnnnnnnnnnnnnnnnnnnnnnnnnnnnnnnnnnnnnnnnnnnnnnnnnnnnnnnnnnnnnnnnnnnnnnnnnnnnnnnnnnnnnnnnnnnnnnnnnnnnnnnnnnnnnnnnnnnnnnnnnnnnnnnnnnnnnnnnnnnnnnnnnnnnnnnnnnnnnnnnnnnnnnnnnnnnnnnnnnnnnnnnnnnnnnnnnnnnnnnnnnnnnnnnnnnnnnnnnnnnnnnnnnnnnnnnnnnnnnnnnnnnnnnnnnnnnnnnnnnnnnnnnnnnnnnnnnnnnnnnnnnnnnnnnnnnnnnnnnnnnnnnnnnnnnnnnnnnnnnnnnnnnnnnnnnnnnnnnnnnnnnnnnnnnnnnnnnnnnnnnnnnnnnnnnnnnnnnnnnnnnnnnnnnnnnnnnnnnnnnnnnnnnnnnnnnnnnnnnnnnnnnnnnnnnnnnnnnnnnnnnnnnnnnnnnnnnnnnnnnnnnnnnnnnnnnnnnnnnnnnnnnnnnnnnnnnnnnnnnnnnnnnnnnnnnnnnnnnnnnnnnnnnnnnnnnnnnnnnnnnnnnnnnnnnnnnnnnnnnnnnnnnnnnnnnnnnnnnnnnnnnnnnnnnnnnnnnnnnnnnnnnnnnnnnnnnnnnnnnnnnnnnnnnnnnnnnnnnnnnnnnnnnnnnnnnnnnnnnnnnnnnnnnnnnnnnnnnnnnnnnnnnnnnnnnnnnnnnnnnnnnnnnnnnnnnnnnnnnnnnnnnnnnnnnnnnnnnnnnnnnnnnnnnnnnnnnnnnnnnnnnnnnnnnnnnnnnnnnnnnnnnnnnnnnnnnnnnnnnnnnnnnnnnnnnnnnnnnnnnnnnnnnnnnnnnnnnnnnnnnnnnnnnnnnnnnnnnnnnnnnnnnnnnnnnnnnnnnnnnnnnnnnnnnnnnnnnnnnnnnnnnnnnnnnnnnnnnnnnnnnnnnnnnnnnnnnnnnnnnnnnnnnnnnnnnnnnnnnnnnnnnnnnnnnnnnnnnnnnnnnnnnnnnnnnnnnnnnnnnnnnnnnnnnnnnnnnnnnnnnnnnnnnnnnnnnnnnnnnnnnnnnnnnnnnnnnnnnnnnnnnnnnnnnnnnnnnnnnnnnnnnnnnnnnnnnnnnnnnnnnnnnnnnnnnnnnnnnnnnnnnnnnnnnnnnnnnnnnnnnnnnnnnnnnnnnnnnnnnnnnnnnnnnnnnnnnnnnnnnnnnnnnnnnnnnnnnnnnnnnnnnnnnnnnnnnnnnnnnnnnnnnnnnnnnnnnnnnnnnnnnnnnnnnnnnnnnnnnnnnnnnnnnnnnnnnnnnnnnnnnnnnnnnnnnnnnnnnnnnnnnnnnnnnnnnnnnnnnnnnnnnnnnnnnnnnnnnnnnnnnnnnnnnnnnnnnnnnnnnnnnnnnnnnnnnnnnnnnnnnnnnnnnnnnnnnnnnnnnnnnnnnnnnnnnnnnnnnnnnnnnnnnnnnnnnnnnnnnnnnnnnnnnnnnnnnnnnnnnnnnnnnnnnnnnnnnnnnnnnnnnnnnnnnnnnnnnnnnnnnnnnnnnnnnnnnnnnnnnnnnnnnnnnnnnnnnnnnnnnnnnnnnnnnnnnnnnnnnnnnnnnnnnnnnnnnnnnnnnnnnnnnnnnnnnnnnnnnnnnnnnnnnnnnnnnnnnnnnnnnnnnnnnnnnnnnnnnnnnnnnnnnnnnnnnnnnnnnnnnnnnnnnnnnnnnnnnnnnnnnnnnnnnnnnnnnnnnnnnnnnnnnnnnnnnnnnnnnnnnnnnnnnnnnnnnnnnnnnnnnnnnnnnnnnnnnnnnnnnnnnnnnnnnnnnnnnnnnnnnnnnnnnnnnnnnnnnnnnnnnnnnnnnnnnnnnnnnnnnnnnnnnnnnnnnnnnnnnnnnnnnnnnnnnnnnnnnnnnnnnnnnnnnnnnnnnnnnnnnnnnnnnnnnnnnnnnnnnnnnnnnnnnnnnnnnnnnnnnnnnnnnnnnnnnnnnnnnnnnnnnnnnnnnnnnnnnnnnnnnnnnnnnnnnnnnnnnnnnnnnnnnnnnnnnnnnnnnnnnnnnnnnnnnnnnnnnnnnnnnnnnnnnnnnnnnnnnnnnnnnnnnnnnnnnnnnnnnnnnnnnnnnnnnnnnnnnnnnnnnnnnnnnnnnnnnnnnnnnnnnnnnnnnnnnnnnnnnnnnnnnnnnnnnnnnnnnnnnnnnnnnnnnnnnnnnnnnnnnnnnnnnnnnnnnnnnnnnnnnnnnnnnnnnnnnnnnnnnnnnnnnnnnnnnnnnnnnnnnnnnnnnnnnnnnnnnnnnnnnnnnnnnnnnnnnnnnnnnnnnnnnnnnnnnnnnnnnnnnnnnnnnnnnnnnnnnnnnnnnnnnnnnnnnnnnnnnnnnnnnnnnnnnnnnnnnnnnnnnnnnnnnnnnnnnnnnnnnnnnnnnnnnnnnnnnnnnnnnnnnnnnnnnnnnnnnnnnnnnnnnnnnnnnnnnnnnnnnnnnnnnnnnnnnnnnnnnnnnnnnnnnnnnnnnnnnnnnnnnnnnnnnnnnnnnnnnnnnnnnnnnnnnnnnnnnnnnnnnnnnnnnnnnnnnnnnnnnnnnnnnnnnnnnnnnnnnnnnnnnnnnnnnnnnnnnnnnnnnnnnnnnnnnnnnnnnnnnnnnnnnnnnnnnnnnnnnnnnnnnnnnnnnnnnnnnnnnnnnnnnnnnnnnnnnnnnnnnnnnnnnnnnnnnnnnnnnnnnnnnnnnnnnnnnnnnnnnnnnnnnnnnnnnnnnnnnnnnnnnnnnnnnnnnnnnnnnnnnnnnnnnnnnnnnnnnnnnnnnnnnnnnnnnnnnnnnnnnnnnnnnnnnnnnnnnnnnnnnnnnnnnnnnnnnnnnnnnnnnnnnnnnnnnnnnnnnnnnnnnnnnnnnnnnnnnnnnnnnnnnnnnnnnnnnnnnnnnnnnnnnnnnnnnnnnnnnnnnnnnnnnnnnnnnnnnnnnnnnnnnnnnnnnnnnnnnnnnnnnnnnnnnnnnnnnnnnnnnnnnnnnnnnnnnnnnnnnnnnnnnnnnnnnnnnnnnnnnnnnnnnnnnnnnnnnnnnnnnnnnnnnnnnnnnnnnnnnnnnnnnnnnnnnnnnnnnnnnnnnnnnnnnnnnnnnnnnnnnnnnnnnnnnnnnnnnnnnnnnnnnnnnnnnnnnnnnnnnnnnnnnnnnnnnnnnnnnnnnnnnnnnnnnnnnnnnnnnnnnnnnnnnnnnnnnnnnnnnnnnnnnnnnnnnnnnnnnnnnnnnnnnnnnnnnnnnnnnnnnnnnnnnnnnnnnnnnnnnnnnnnnnnnnnnnnnnnnnnnnnnnnnnnnnnnnnnnnnnnnnnnnnnnnnnnnnnnnnnnnnnnnnnnnnnnnnnnnnnnnnnnnnnnnnnnnnnnnnnnnnnnnnnnnnnnnnnnnnnnnnnnnnnnnnnnnnnnnnnnnnnnnnnnnnnnnnnnnnnnnnnnnnnnnnnnnnnnnnnnnnnnnnnnnnnnnnnnnnnnnnnnnnnnnnnnnnnnnnnnnnnnnnnnnnnnnnnnnnnnnnnnnnnnnnnnnnnnnnnnnnnnnnnnnnnnnnnnnnnnnnnnnnnnnnnnnnnnnnnnnnnnnnnnnnnnnnnnnnnnnnnnnnnnnnnnnnnnnnnnnnnnnnnnnnnnnnnnnnnnnnnnnnnnnnnnnnnnnnnnnnnnnnnnnnnnnnnnnnnnnnnnnnnnnnnnnnnnnnnnnnnnnnnnnnnnnnnnnnnnnnnnnnnnnnnnnnnnnnnnnnnnnnnnnnnnnnnnnnnnnnnnnnnnnnnnnnnnnnnnnnnnnnnnnnnnnnnnnnnnnnnnnnnnnnnnnnnnnnnnnnnnnnnnnnnnnnnnnnnnnnnnnnnnnnnnnnnnnnnnnnnnnnnnnnnnnnnnnnnnnnnnnnnnnnnnnnnnnnnnnnnnnnnnnnnnnnnnnnnnnnnnnnnnnnnnnnnnnnnnnnnnnnnnnnnnnnnnnnnnnnnnnnnnnnnnnnnnnnnnnnnnnnnnnnnnnnnnnnnnnnnnnnnnnnnnnnnnnnnnnnnnnnnnnnnnnnnnnnnnnnnnnnnnnnnnnnnnnnnnnnnnnnnnnnnnnnnnnnnnnnnnnnnnnnnnnnnnnnnnnnnnnnnnnnnnnnnnnnnnnnnnnnnnnnnnnnnnnnnnnnnnnnnnnnnnnnnnnnnnnnnnnnnnnnnnnnnnnnnnnnnnnnnnnnnnnnnnnnnnnnnnnnnnnnnnnnnnnnnnnnnnnnnnnnnnnnnnnnnnnnnnnnnnnnnnnnnnnnnnnnnnnnnnnnnnnnnnnnnnnnnnnnnnnnnnnnnnnnnnnnnnnnnnnnnnnnnnnnnnnnnnnnnnnnnnnnnnnnnnnnnnnnnnnnnnnnnnnnnnnnnnnnnnnnnnnnnnnnnnnnnnnnnnnnnnnnnnnnnnnnnnnnnnnnnnnnnnnnnnnnnnnnnnnnnnnnnnnnnnnnnnnnnnnnnnnnnnnnnnnnnnnnnnnnnnnnnnnnnnnnnnnnnnnnnnnnnnnnnnnnnnnnnnnnnnnnnnnnnnnnnnnnnnnnnnnnnnnnnnnnnnnnnnnnnnnnnnnnnnnnnnnnnnnnnnnnnnnnnnnnnnnnnnnnnnnnnnnnnnnnnnnnnnnnnnnnnnnnnnnnnnnnnnnnnnnnnnnnnnnnnnnnnnnnnnnnnnnnnnnnnnnnnnnnnnnnnnnnnnnnnnnnnnnnnnnnnnnnnnnnnnnnnnnnnnnnnnnnnnnnnnnnnnnnnnnnnnnnnnnnnnnnnnnnnnnnnnnnnnnnnnnnnnnnnnnnnnnnnnnnnnnnnnnnnnnnnnnnnnnnnnnnnnnnnnnnnnnnnnnnnnnnnnnnnnnnnnnnnnnnnnnnnnnnnnnnnnnnnnnnnnnnnnnnnnnnnnnnnnnnnnnnnnnnnnnnnnnnnnnnnnnnnnnnnnnnnnnnnnnnnnnnnnnnnnnnnnnnnnnnnnnnnnnnnnnnnnnnnnnnnnnnnnnnnnnnnnnnnnnnnnnnnnnnnnnnnnnnnnnnnnnnnnnnnnnnnnnnnnnnnnnnnnnnnnnnnnnnnnnnnnnnnnnnnnnnnnnnnnnnnnnnnnnnnnnnnnnnnnnnnnnnnnnnnnnnnnnnnnnnnnnnnnnnnnnnnnnnnnnnnnnnnnnnnnnnnnnnnnnnnnnnnnnnnnnnnnnnnnnnnnnnnnnnnnnnnnnnnnnnnnnnnnnnnnnnnnnnnnnnnnnnnnnnnnnnnnnnnnnnnnnnnnnnnnnnnnnnnnnnnnnnnnnnnnnnnnnnnnnnnnnnnnnnnnnnnnnnnnnnnnnnnnnnnnnnnnnnnnnnnnnnnnnnnnnnnnnnnnnnnnnnnnnnnnnnnnnnnnnnnnnnnnnnnnnnnnnnnnnnnnnnnnnnnnnnnnnnnnnnnnnnnnnnnnnnnnnnnnnnnnnnnnnnnnnnnnnnnnnnnnnnnnnnnnnnnnnnnnnnnnnnnnnnnnnnnnnnnnnnnnnnnnnnnnnnnnnnnnnnnnnnnnnnnnnnnnnnnnnnnnnnnnnnnnnnnnnnnnnnnnnnnnnnnnnnnnnnnnnnnnnnnnnnnnnnnnnnnnnnnnnnnnnnnnnnnnnnnnnnnnnnnnnnnnnnnnnnnnnnnnnnnnnnnnnnnnnnnnnnnnnnnnnnnnnnnnnnnnnnnnnnnnnnnnnnnnnnnnnnnnnnnnnnnnnnnnnnnnnnnnnnnnnnnnnnnnnnnnnnnnnnnnnnnnnnnnnnnnnnnnnnnnnnnnnnnnnnnnnnnnnnnnnnnnnnnnnnnnnnnnnnnnnnnnnnnnnnnnnnnnnnnnnnnnnnnnnnnnnnnnnnnnnnnnnnnnnnnnnnnnnnnnnnnnnnnnnnnnnnnnnnnnnnnnnnnnnnnnnnnnnnnnnnnnnnnnnnnnnnnnnnnnnnnnnnnnnnnnnnnnnnnnnnnnnnnnnnnnnnnnnnnnnnnnnnnnnnnnnnnnnnnnnnnnnnnnnnnnnnnnnnnnnnnnnnnnnnnnnnnnnnnnnnnnnnnnnnnnnnnnnnnnnnnnnnnnnnnnnnnnnnnnnnnnnnnnnnnnnnnnnnnnnnnnnnnnnnnnnnnnnnnnnnnnnnnnnnnnnnnnnnnnnnnnnnnnnnnnnnnnnnnnnnnnnnnnnnnnnnnnnnnnnnnnnnnnnnnnnnnnnnnnnnnnnnnnnnnnnnnnnnnnnnnnnnnnnnnnnnnnnnnnnnnnnnnnnnnnnnnnnnnnnnnnnnnnnnnnnnnnnnnnnnnnnnnnnnnnnnnnnnnnnnnnnnnnnnnnnnnnnnnnnnnnnnnnnnnnnnnnnnnnnnnnnnnnnnnnnnnnnnnnnnnnnnnnnnnnnnnnnnnnnnnnnnnnnnnnnnnnnnnnnnnnnnnnnnnnnnnnnnnnnnnnnnnnnnnnnnnnnnnnnnnnnnnnnnnnnnnnnnnnnnnnnnnnnnnnnnnnnnnnnnnnnnnnnnnnnnnnnnnnnnnnnnnnnnnnnnnnnnnnnnnnnnnnnnnnnnnnnnnnnnnnnnnnnnnnnnnnnnnnnnnnnnnnnnnnnnnnnnnnnnnnnnnnnnnnnnnnnnnnnnnnnnnnnnnnnnnnnnnnnnnnnnnnnnnnnnnnnnnnnnnnnnnnnnnnnnnnnnnnnnnnnnnnnnnnnnnnnnnnnnnnnnnnnnnnnnnnnnnnnnnnnnnnnnnnnnnnnnnnnnnnnnnnnnnnnnnnnnnnnnnnnnnnnnnnnnnnnnnnnnnnnnnnnnnnnnnnnnnnnnnnnnnnnnnnnnnnnnnnnnnnnnnnnnnnnnnnnnnnnnnnnnnnnnnnnnnnnnnnnnnnnnnnnnnnnnnnnnnnnnnnnnnnnnnnnnnnnnnnnnnnnnnnnnnnnnnnnnnnnnnnnnnnnnnnnnnnnnnnnnnnnnnnnnnnnnnnnnnnnnnnnnnnnnnnnnnnnnnnnnnnnnnnnnnnnnnnnnnnnnnnnnnnnnnnnnnnnnnnnnnnnnnnnnnnnnnnnnnnnnnnnnnnnnnnnnnnnnnnnnnnnnnnnnnnnnnnnnnnnnnnnnnnnnnnnnnnnnnnnnnnnnnnnnnnnnnnnnnnnnnnnnnnnnnnnnnnnnnnnnnnnnnnnnnnnnnnnnnnnnnnnnnnnnnnnnnnnnnnnnnnnnnnnnnnnnnnnnnnnnnnnnnnnnnnnnnnnnnnnnnnnnnnnnnnnnnnnnnnnnnnnnnnnnnnnnnnnnnnnnnnnnnnnnnnnnnnnnnnnnnnnnnnnnnnnnnnnnnnnnnnnnnnnnnnnnnnnnnnnnnnnnnnnnnnnnnnnnnnnnnnnnnnnnnnnnnnnnnnnnnnnnnnnnnnnnnnnnnnnagagcgccacctcccgcgccaagggcgccaacctccagagagtcccgcgccaccggcgccagatcccacgcctcaagcgccatcttccagagcatatggcgccaaccgcgccacccacggcgccaaccgcgccaactgggaaattcagggtggttctggcgccaccggcgccgacctggcgcccagagcgccaaccaccagagaccatggcgcttggagcgccgttcccgcgcccacagtgccaacaagcagagaccctggcgccaagggcgccaacctggcgccgtcagcgccacaccttttggccacggcgccatccgcgccacacctggcgctggccgcgccagattatgcagaagcaattctgcagagtgttttctgcataatccaaaccaaaaggcctcagactcgcgccacacgcgtcctaattcgcgccaaacgcgctgggactaagggatattacacttaacaatttatttttattagagttgataatttgatagtgaattgtttatattaacaattgttgtttaattaattattacaaaattaaaaaaaaatttcaattcaaaatttaatgtggttcaaattaaatactcactctaataattatagtataggaataaaaattttaaatctatatgacatttttgcaagatttataaatttaagataaataattcatataaccatcatataatttccaaataacatatatagtttcaaaattaaaactctctaacattacatataaaatttacatgaaatgaatctctaattctccacccaatcattattacatttaataaacttatatattaccagatatgcaatattacgtcttccatatagtttattttatttgatcaaagacattaaattgcatatcaatgtaatgaagtgtgctatgtctagtaccatatataaatccaacatatacatatacttgagtaattaaatgaacacactatttattgtaaataataaatattgaacattatgtcttatttgaatagtttaagtgaaaagataaatttatataaatttttaaatgttgtataattaatcactactttctttttttggttaaaaaatatatatatctcaagtctcaatagatattcagatattaattctttttgaggcataataatcaccaaagtaaattttatctctttaataaatacttctttatgccatgactagctaatcgattttnnnnnnnnnnnnnnnnnnnnnnnnnnnnnnnnnnnnnnnnnnnnnnnnnnnnnnnnnnnnnnnnnnnnnnnnnnnnnnnnnnnnnnnnnnnnnnnnnnnnnnnnnnnnnnnnnnnnnnnnnnnnnnnnnnnnnnnnnnnnnnnnnnnnnnnnnnnnnnnnnnnnnnnnnaatagacatgcaacattacatcttccatatattgctttatttatctttatcaaagatattaaattgcatcaatgtaatgaagtgtgctatgtctatataataaatgtatttattttcattaacgataaacttacatatttctagacatgtaatattgtatcttccatatagttctttattttttttttaacaaaagacattaaattgataagataatattttattagatttgtttaaattaattcaaaattaattagatagtatctgattaaatttaaaattcattacccgacatgacaaaagcagccacatgtcaataaataaatagatgaattatcaacttacataaatgtgtattatttataacctacaccaaagtaatatgcccttactaaaaagaaacaagctttgcaacttggtgcatacaagttgagtccaacttactgacaagaaggcccactgtacaagacacaaaaaggctcaagctaattgatttttttacactcttaaaatatccctcttctctctccttgtcaccctaattatatatattactgattaaatattaaacttttaagaaaacatttggtaacactgatgaggaggttatcgtgatttcaattatattcaaatcaggaaaagtaatcaccctagtacacagaaaaaaagatcatcacgtggaaaacaattgaggatagtaaggtaacagggtaaataaaggccaacatcccaatcgttgttatagccaagaccggactttggcattcattattaaataagcacgtttaaatcttaccagcaactgaaagttcagcaacacacatgaagttgaagtctcagcttaaatatgtacataatatcatgttcataaaggtctcccgaggatataatataacgcaaccacactcggttttgcgagtcttggacactttgacaaatataagctaaggcaatagagggccagtgacaggttaaaacgtcattccattatgaaatacaacagctagtatgaaactggatctactcagtgagaagcatgggaatttcatcgaccggagcaggtagctgcaaatttccagaagttttatgcgagttagtatttctctgactgcattagaaaaaataccaaacaagggaaaaaaggttgcagatgatatttatttataagataatatggacaaacttaactagtgtatgcctctaattagtggaaaacttgcagttttgaggatttgtttgttcatttacaagagcaacagatgattgaaaagctcatattaaccatcctacccttcccatgctcagaccatattgcatacacaaaaaactcatattaggtgatatgatcaagagcgtttgtcagcatgccaaaaactcaagctattagcataggtgcaattcttggcatataatatcctgcatcagacacagacaattccctatttaagccactagatatcaaccactacgttgaacccgatccacagacccaatcagtacactacactacacaccctcgtgacccttttgggcatatcataagagacgttgaggagtccaaatatttcatgagttattacatactcacaattggccataagtagagtgaactctataacattacttcccccttggcgcaaggaaagatcaatgactgccttcaactttaaagtgcatttaatacaagcagaaacggcttaaaaccaaggaactggtgcgaaactagccctgatcccaacaactttctatctttttttattcataaggaattgaactcaagtattactgaatttacaataattcacgtacattgtttaaccgactgaattagagcccttagtaatcccaacaatattattcaatgttgtactactataaattaggtccactgcatagtttgagttccttgtattgcccatagggcaatatatagactgtattgagtcaattccttcaacttttcaaaaactctgttttagtcgagaactagaaaaattaatctctcgaaattcctagactaattcaagtggatgatccctttaaattcctgagcatgtggatacgcatgtcgtaaaacacatacacactaagaaaccctgaatctgatgacataaatcacacctctcatgaaactaattacagagcatcaaaggtttaaccatttcagtcaaaattcaaaaaatagagacctaaaaaaaattcgttgactattccccatacttagcttcgatgtttacttaagtataagtcttttcgaaccagtttctggattagagcaattaaacctaatctagtgttccaaaaataacaaaaatcgagcgtctaaacaagaaattaggaaaagagtaaaagaatggcgaacctgaattgaacgtggaaggcgaggggggcacgagagggatttgcggcaggaacgaacggttttgaactggtcaacgtcgagtttcttgttgatgatgccgacctggaagtagatgctgtcggagggtggcaaatcgaccctgatctcgtcgacgttgaaccagagaaagaggcgctggacctgaatgcccttgagattggtgatggagccgtagctgagcttgccggagatcttgctctcgtagtaaactaagtaatcgaactgtatgtagcagggcttcggcaaaacgacgacgaattggccatcctcgtcgagcgtgtagtcggtgacggtgtccggtaacagaccactcgggagcccgtacttggggagtatatcgtacacgctctccttcgccgccgccgtgctaacacacgcgcaccacaacagagtcgtgaagattgccatggcaacaaacgcgtgtgatgatgatcggcttgggggtgttgttgccatggctgaaaacgttagagagagagagggctgtagagacaacttccagtgaccgcttcagttacgattctctctcgctctgtgtctggtctttgtctcctttcgggaagagactcggtttcaattttaaacacaccaacaactacttacatccattatttcgaacgattgtttttattttatcaaaaattaaaaattaaaaactatttttttactccctctgttgcggtatataatgattacaaaattaattaatctcaaaaaattttaactttttctaaaactatcttttttttattaattaggaatattgaacttgacttgaacaaattcatactatataattaaatttattatatgtaaattaattattaaatgcaaaaaatattattttttaattcgtgtagtttattaaattattaagttaaacaatccatgattttttaagttgtcatttttatttttgtcttgattttatttatattttttatgttaatataacattttatttctatctaaagtaaaatatcatattagtcttgaaataattaattctattagtcaaatattattataatttgatttctttttaatatatttagtcattatatacatataaagctttgcgcaaaaataaattattgttttaaaattgtattttttacaaataaaaaaatatatattttaaaatatttagatccaattaactttactcgagtcaaccaatttatcatcagggctaggttgggtttaattttttgtttacaaacctaaccaaacccaatacgtaaatatttgatgggattgagtgataggttttgttaaatatgattcaatttaacatgtgaacactttatcattaatattcatgtctctcctaattatttattaatacattatcttttcttttaatgagagatatttttagtctaataataattactacaaaaaatattataaattgaattttataaaaagaaaaaaatatcattttaaatttaaacttgaattttataaataaaaatgaaagaaataaccaaaaagtctttgatagagttggacatttgggtttggacccacatgtcgctcgcgatatacatgtcttgaaattttgagtccgtttgaatccaggtttcggaagtggacttgcttatatgcttaacctgaatcttcaacatgtaatatatgactgtgttgtttcggtgatttataaaaagaatttgtggaattggttatgcgttggtaaagttgtgtttcggtaatatgactgtgttgtttcggtgatttataaaaaaaattcttctggagcttgccaggtatttgctcgtttaataaatcatatttcattaatatataataaactgtatcttcaagaactttttataacatccaagttcgtgggacgcgtggccgtaccaacaatgctaaactcagcagtcagcagtcagcagctttcaagtttcaaatgtgactttttgtttttgaattttgagcataataaagatatttttttctgaatgaatataataaagttatatttccgcaaacaataaatatttttaaaaaagtttgctaaaagcgagtttaatttatttatttaagataaaataagcctaaaaaattattatgtactaagaagcacaaaacttagaagatacatcttcgaagatatatttagtattatttacctaattgattatgttaatatttaatataaatctttattacatgaaatacgagaatgaaaatttaattttaattgaaaaacaacacaaagcatataagaaattatttctaagttttatcatattgttaaatctcataaattcataatttataataatgaaactatccgacaactgtacgtgaatctgaataagattattttaatttaaccactagtttcaaatttgagtcacatatatgtaattgcgctagatacttaatatgcgtccacattaattatatccgaattaaacatgattatctccattaaaaaatgtctatggtctgaaaaaaaaaaaaaaaactatccaatacaaaaaaatcacatgcctccattataaaaagttcaaaacactatctccaagtgtgtgaacgagctggtttgagattgctccagtttcatcagaattttttagtttaaatcttgtgtatgcaggtgcattaaatacgaagagttttgtcggtcgtaatcgaataatattgcttgtcctattataaaaaagaagttaaaaacactattgcataatattattaaagttggctacatagatcatggtcctaggctttttttaatgtttattttcatgaaggcttgttgtttaacttacaactagcggaaacccaactttgtgatgcctattggcccatttaaatgcttgcttattcaggttaacctatttaacccatgacttggactgaaccaacccatgtaatattttcttttttgttattttagacttttagctcttttttaaaaatatttttatttaggtttgcaaaccaatgtgaaaatgatttgaaccctgacttgcctgttcacctcgcaagcaaatcctgcttgccctatttgcaaactaacgcaggccatacctatgcaaattgcggctttttgactgataaggggcattcttgttttaatataggagtaaaaattttaaaaaaattattatttagagataagtcgtgctaactttttagtgagacatcgtgtcatgtatcatgatttttattttttattttctgttcaagtagtagtaaatttaccactttaccgtgcttactattcaaaagtcctacaagcacctgcacgttttgcttttttattcatttgtagcagcacctacaccttttgctttttattcttttttttattgagtttggcttccagattttttgttttggttagtagcgtggccttttattctttttattttggttagtagccttatttttttttttatatgtatgtatataggttacgactttcgtacccatatatatatatattaaaattgttttatatttttattagttagtaattttaatattgtaatttgaaaataaatattttttgatgaatttttttaataataagcattttttatatataaaataagatatattaattttgataaactaaacataaaaggggtttattttttaattttcatacttattaagtaattttttatatttgttattggtgtataaatatgtaacaattttatgatatgtgttacagtttcttatggacatcttatgacaccctcaaaataaggtcattaattcataatgtagacatatttatgattgtgtcatgagataatttgaaatgagacaaaatatttcacataacccatcaaacctggacaactccacannnnnnnnnnnnnnnnnnnnnnnnnnnnnnnnnnnnnnnnnnnnnnnnnnnnnnnnnnnnnnnnnnnnnnnnnnnnnnnnnnnnnnnnnnnnnnnnnnnnnnnnnnnnnnnnnnnnnnnnnnnnnnnnnnnnnnnnnnnnnnnnnnnnnnnnnnnnnnnnnnnnnnnnnnnnnnnnnnnnnnnnnccctgcacctgtggcgctaaccgcgctggaaaccagagagaacaggttttccagagcacttctggagctatccgcaccagaatccagaggaaacaggttttctaggacacttgtggtgctgaccgcgccacccatggcgctgattgcgccgcacacccagaggaatgaccctctagatctcattggcgttgatcacgcccctatggcgctactagcgtcatcccctcaaatgcctggcgccatccgcgccagactccagattatcacattttcgacgatgcgtatatagaagaactcataatcataaatataattcattcaaattatatgttcggttaattttactactattcttacaaaattaaattacgattattgtgccaaatactttattaacataattatatttgtaaaaattacttaacaaaaacaaattaaatataacttatttcatatattaaaagaaaatattattatcaaaatattttaagtattttaaattttaaattttaaaattagaaacatattatacaaaaacaattaaataaatattcataatacaaagtatttataacattaatttcagatatattaaataaaaagatataaaaattacatacaaaatattaaactaatttacattaattcaaaatgacttgcttttttaaataattaaacaaacaaatttttaattctttaaataaccaaaaactaaaatacaatataacaaattcaaataacacaaattataaaaaacaaaataaataaaacaaataaaaccaatgggttacgtaacccacgtatataacaataattttaaaaaatgataaacaaaaattaacgaaagaaaactaaataaaaaaccaaaattgaataaaataaaaaaaacctaaaacccttaaatcaatgggttaggtaactaacaataccaaatggggcttctgaacatacgagagatcatcataatcgtggcccccacttctgattctgatctcaaggctgaagcttttgcagaagatgatggaggcgtggatgtgggacacgtgggttggtgccactatgaaggatggttttggagtggtgggggaagtgaatctgaatctgaggtttctgatgtaggagtccaaggtgggagggtatgaggtgctgttggggaaatatgtgacggcagagattggaattggaagagatgggtcagaatggagagagaggcaatggagaatgttgtcttgaaaaggttctaattctgaagctgctgccattagaacgtagagtagaaagattcagacaaagggtaagatcgcaatcgcagacatcgataggcaatggatggattcagatttcagaggttccttatggaagaaggaagccagagaaagggatgatcagatattcgaatactatagtttcttcttccgggttacgcgtgaaggataacgtcgagggtaaacaagagacataagaaattcttaagctacactttgttccaacgaaaaataaaatgaaatgagatgaaaattttaaattgagatgaaacttttgaattgaagtagagtacaaaagtgtgatatttatatagtgatggactgtgatactagtgattatatttcaatatccacaaattttaaacactttatcaacgattttaatttcattctttctctcttttatcaaattatattatatatcaaatcaattacttatttttctttatctctctcaaggtatgtgtacaacaaatattttccttttctttttctacactgttaggcgttagctactaaactcttctttctattatcttgttcaaatacttttaatatttttcttttttagatatattccatgtattatagttgtagacgagtaaaaatatctcaaactagttttagtaactatgtaatacacggatatgcaaattatctattgatcagtaattgcaaagactaacgacaacaaaaatacgagttttagagaccttttaaactttgttttaaaaagaattaaaataaaaaagagtaaattatagggattagaagtatattaaagtcattctatttttctaagaagaatgaattacatgatcaacatgtctgtatataaatatattattttagtttatagttatgaaagtgatcnnnnnnnnnntttatcaacgattttaatttcattctttctctcttttatcaaattatattatatatcaaatcaattacttatttttctttatctctctcaaggtatgtgtacaacaaatattttccttttctttttctacactgttaggcgttagctactaaactcttctttctattatcttgttcaaatacttttaatatttttcttttttagatatattccatgtattatagttgtagacgagtaaaaatatctcaaactagttttagtaactatgtaatacacggatatgcaaattatctattgatcagtaattgcaaagactaacgacaacaaaaatacgagttttagagaccttttaaactttgttttaaaaagaattaaaataaaaaagagtaaattatagggattagaagtatattaaagtcattctatttttctaagaagaatgaattacatgatcaacatgtctgtatataaatatattattttagtttatagttatgaaagtgatccatcatccatgattggtcaaaaagctccgaacatattttcagtgcaaacttccctcttctactttaacataaaaccttttctaactaccatcatgtaatctacttatattgttattcggaaaagaaacttacatatctataaaacggctatccacaagtgtcttttaaatattcaaaatacttaatattgtatgcttattataattaaaaagaaagtaaaatttgttactcgaaagactaagagtctaatggcatgcctggctatattcttaatactatatgatatactaatccgaaaacatacataaaaagtataaataagaaggatatagagaaaggaaaaggaaacggaaaaagggcttccttccataaatgaacctcttttctgtgttgcttcactgttagaacttcgaagtttctaacttgcatggcagttgaaggaaggtttgtccttggtccttggtccatgtcatttaggctttagcccctagaaaacatttcttgaacatcaaattggacacagaaaagttgtattctttgattttaaggagtattttttatatgcataaataaaataagtaaaaaacataaagataattgaatgatacgtaacatatgcgttaaagctatgtttcaacaatggaactgcttaaagtttaagaagtaggcaaatatatgtattatctaatacatatcttgaccaagggtcaattcgggccacctgtttaaacacgtcaaaagtcttactaaacaacaaattacacgtttagttttaagaaagctaccaattactatgataattaaacaatgttcccattgaagtattttttgaagtcaagtttacctgaattaacaatagttcaaaaagtatgatgcctcggcaagtagagtaatattaaatacgtaccactcacaaagctaagttctcttttcgcctgacgacaatcataaagacattctcttcaagtctatccactttctgtgttttttctctggcctatggccatgctatacacatgctgagattgtaatataaatagtgaactttcactctttcaggaatcaagaagccattctacagcaaaatctctctctctctctctctctctgagcttagagtttgttttaccttatcttctataatggatcatggaaatgacttcagtggcagtggcaccaacaagaggagcagcaatgaaagtaacgataggaagaagctattaatgagcagacaaatagtttttgagaatgagaaagaagacatcaacaaaatggctgatgcattcgtcaacaactgccgcaaacaactgaagattgagagagaaaattcattcaaacgttttcaggatatgataaacagaggcgcatgagtgatttgagctgaatggaattgctgcagtggctaaataatagtagtgtgattgttacttcacatacgcaaaaaaaaaaaaaagtgcgattatttcttaaaatggagaataatacaatagtgaaggatataattttggatttatgaaaagttcttcagtagttcataaagttcagagtttctctaaatatttttgtattcctctcagccaccaaacattcagggaaaagactagttgtgcatctacctttttttcttaatttacttttaataaatttgtatcataagtaaagaagtaattttgctcaagttatagtttaacactaattgcatacgtctctcccaacaagaatctcgaactaatcccttctcctagacttgattagcgttggtatttgaaatctgtatttgacactagcttttagaaaaatattatccaagcagatactatactattactcttaaaaaacatgcaactgattttcaaaccatccattggaatgacttttgccacaacatggggatatgatattctgttccccctgcttactgaataaattaacttgaccaaagatacaaaagttttttgatgttttctaataaatcatatacagcggaaacgcatgtcttacaaacctaatatactgtaaagaaaggaaaaggcacagccttgagtgaaacaacatttacaatatctgccccctattcataattgtaaaggaatgacctcattctatagccaaaatcaacaattaacctcatctttacaatgaaagcacaatctctttcccacacaggaaagtggataaacctgtttcaatttgattttcccaaaataccaacaatttcctaactgtatagccaagattatcatcagaggagtttggatctcaggcttgaagaacctgacaatgaacaatatgactcttcaaactaccacgtccggctatagtcgaccataaatttctaactaaagacctgacatgacctttcccagcaatattttcccaaagttgaggattgctttccacacgtctgtttggactcaaaacatcaactagactgatgctcatattgttgcgtataatgcaaagccttccattaaggggaacaagagcagcagcgtcaagagcacgggaactacctaaatggagcttgctatcaatgaacttcttccatgaatctgttgctctgtcatatactttgagcttgcacccatcctggcaatcaagtgcatagagttgcccattcagtgagatactaggattacgccaaccattgaccattccattactcactgggatccaggtatcagtttcctgggaataggattcgcatatgacactgcgattagatccaagtcctttcaaaaaccatgttccgttatgaactacaccaataaagggaaccattgctgtggtcatctctgagataaagctccacctgttccggttagggtcataaacttcagcagatcgaagagttctttgaattccttcacactccccaccagcaacatagagacaattatttattacacaagaaccaaacagatgacgtttccgcagcatgtctggtgctctatgccacttattagtacgggcattatagaaaataacacgtctcatagatcccttcagtggatctcttccaccaaataaatacaggtggcaaccactaagaacggcacagccaaatcccaatgcttcagaatattccccaggaacaggtggaagggattgccacagttggtagatgggatcaaaagcatgcaatgaaattcttccatcacgatctcttttgatgacataaacccattcttctgccattccaagacttctcctgagtgaatagaagaaatttccagacaggaggcgataccatctcttgcaaaccaaacgcagtttactgtgctcaaccctaggcacacgaatcaaacatgcaatagcaagatcatccggaagaccaggcaggagaggaggctgaactctggtcctctctctacgtgagtttttgctcctatgtgcattcgggtttatgtcaggttggatacataacttcgatcctggaacaaatttccttgccccaacaactgttttcaggcctgaatctaccttacagtagcaagaaacagagtcaacctgtaaaattctcaatgcagtaagttgaaagtaccattaaaatatcaaaaagatttcaccaaaaatatgtatatgcataatgtccgagagcatattcacatgcacacagtaagctttagatacttctccttccaacttcaggttccaaagaattgaacagttcctactttctatactgctttttttcagcaagaaaacaataaaaggaagttcaagaccaataacttcacaatctattgacttgtcaaacaataaactattattaattttattaagctgaaatctttattttcttggaaaggtcatattaagttttaaaattataatatatgaatatagtcttggaattttcaatggctatattgtttgacttgttgatcatgagttcgaatccagaaacagcctctttacatatgtaagggtacagctgagtacaatattcctcctccttaccttcgcatatcgaggaacctttgggtaatggggtacgtaatttttgtatagccatggaattttcaatgctgcaggtggggcagtaagatcttaagaccaagtaaggttatattagataggttcattacatactatgattaaaatagcgccgctttagcgcgctatctcgcatcaaccgcgagttgcggcacccagccgctacttccgcgccgcaacgtgacggtttccggtagcggtcggtggcggcggtgcggttggaagctcttgtggcgctatcgcaccgctccatggaagagaagcgagttgcagagctcctccgccttcagccgcctctccaactcctccctgccgtccttcctcagcgcgttcagctccaccaagcctccgaacagcctctcgccgaagaagatcttcggcaccgtcgcgcttcccgttctctctctcagctccttctcccgctccgcgaaatcgcacggctcctgatgctttgaactgtgttttctaaatttgaataagcggctgagatgcaatttgggactggagacacggatcgtgaaatctaattgcttgctttctattggttgattccactgactagttgtggtacgttggaacttggaagccatgtgaggattatgcgttatggagcaattttttttccagcactttttattgggccctcggcccatgaaatgtaaaacagacttaggcttttacttccaacatcccctattttgcttcttgaaccccgaaaaaagcctcaaagggataatttattataagtatggacttcacagtagtggctttaccgctatagcgtttttggggtcggccgctaccgaccgctacccgctacccactatttaaaactatgacttcatgatgaaaatgttgaacaaatgccataacacttcagctatcctcagcttctgctaaaatgtttctattcaaacccttaggtctaatatcctcaaattttaaaaagtaaaaaataagggatatctgcaatatattggaattaaaatacatgcaaatgatgctcggtcagagtaacataaaaacagaaaacaagatcaaataaatcactttattactgcttgtgaggcttaaataaaggtgttaggcgtaccattattatccacataaaatacaaatacaaataagagaattttcaagagaaaacaaggagcatctgggtatcaccagagagacatcttataagagtttgaaagtgaatttataaaaatagttactcttaaaataatctcaagttaaaaaaatgaaatcaatgaaaaactcccctttggccacataagaaaggccttttcagtaactacatcctgcatttgtaatacatatcatgtaagttacacttccagaatgagggaaggtagtgacaagcagtaaatttgaaggatcataaaaggatgtgataaggtgagatgattcattaaacaggcttgatggagatactaccatcagatgaattttttaattgagacaaaagaaaatgaaatatcaggtagccaaaaaagtagtgaactacaataaaggagaaatacagaaaatcttgggaaacatatgaggacggagagtagataagaataactctatacaagagttatgataactgatcattttcaacacccattattataagacaaatagcttaaggtagagctagtgatattgatgagcagaagaatttgcaggaataatatgctcagggaaaaaaaggttgacatataaaccaagatgaatttaatttatcttatatatgtacaaatataacctgatagctttcgatggaaaatcatggggaacaatgtaaaaggaaaaatgaaaaaaataaatctctatgctatatgaaggtgacaataaaaaactaagctcactctttgatcaaatagctaaatgaaaacaaagaacaaaggctagatataaatgagcattgcagctatgtactaagattatacttgtaaatactatgtttacagcagctggaaaattcttataaaaatattccatgaaaaaattatatggcaagaaatggaagtagatagaagaaggatgaaaatctagctagccaaaaaaataaaacaagaggggaacattagcccaaaacagatttccactttctcagcacatccattagagaagttaaagaaaagtattccacccccctcccccctaaacaaaaatgtcctaaactcccttgttggtacctacacatgcttaagcctcaaacccaatacatacccgagaaggcaaacatataaaatcctcctggttggtaacattctctgtcaagggtgtggagtatggaggttaacattccccatatgtaaaacactagctaagtacaactcgtaattagcaagaccgaattgcatcaacaaaaaggtcttgggttcattcctgctgatgaactagtgatatgcaaccttggaatggagcaacccctcaaacccctaagaatttagccttttaggtgccaaaaaacaaagagaatggtagcattctcagtcaaaggtgagaagtaaggacgatggaggttggcactccataaatgttagctgcgtgaaactctatagtctagaacatcatgtttaggtaggattagaatttaggaaagtcaacacacaatgcatgttgaggcagcaagagacttctaagatctaattttgactgaagagccctagaaataaacgagagcttcttcccatttaagaactctaaggttcatagactacccaattgactgaagttacaacttagttctccgcctctcttccaaacacaagcagagaatgataggaactcaagttaaccaaaacctcaagcacagcgctggccaatcgaaccttttatccacacaaaaaagaaaaaagaaaaaagaagaagctgcaactgaaaaatggagaaaaagtcatactattcaaaagaagaaaactaatatgcagataaaaaattggagtgaattggactttttaccagtggagcttgaactctagataccctttgagtattcgttgagctttcaactaactggttcatttccgaagccgagtcttgcaaatgaatggatttttcaacgcaaattaagcatcttggtgcagatcaacacaactcctattgaacctacccttcaattcctggaacccgatccagtgagcagaagagaaaagcttgtatctttacctcaggaactgcaagagaacgaaaaacaaagaaaagggtcattcgagttttgaaggaaggaagaagaactaagactttaagagcggtgagatgaggagcaccttctctcactctcttctttcacctttggttgagaatgagaaagaaaccacaagctttagcttcacaaaaattgtgtgatttttttttctctcttggggatttgcgaaaaattaattaaagtggtttttttaattttattttaatgttaaactgagttgtgtgaatttgcggaattttaatataaattgtataactgtcataagaggacacatcgcttcattcgcttgtgacgatggtcctctttaataaatgagttgcagttcatgggtcaaaccaacccaactttgaaggcaaaggagggagagggagagggagagagagagggttttctttttttgatttattgatcgcagaaaatatcatccttttgtgggattgtgaagattggccatcacatggctacttcgaagtccgaacagcttttttgtctttttctttaacacattttggcttttaacatttttcttttcttttaactcacggccagtttggtgtttgcattgtttgcgagttccgatgatcgagttttggaggaaaaagatttgaattactagttgaaattaacagtttaattttcaaattaagagaatctaactttcatgcactatgagtaattttattatgttaataggttagaaataattattctaaaattaataaattcatcatatttgttaatttataattggatgataatgtaaaatatattatattaccaaagtcattttgattaaattcttaaaattaatcagtagaaaaaaaatgataaactcaaacagaactaacctaagaaagaataaattagatatattcagattatgaagttaataacatatatttttcaaaatattaaataaaaatgaaaaattatagatctaataaatacacaaattattataaaaatgataaaagtgtccaaattttttctgaatttagatttttaattgtagtttactataagtgcatggactaaatgacattgaactaatttagcttgataaatagtcttaggttttagttctgaatataaatttgcactnnnnnnnnnnnnnnnnnnnnnnnnnnnnnnnnnnnnnnnnnnnnnnnnnnnnnnnnnnnnnnnnnnnnnnnnnnnnnnnnnnnnnnnnnnnnnnnnnnnnnnnnnnnnnnnnnnnnnnnnnnnnnnnnnnnnnnnnnnnnnnnnnnnnnnnnnnnnnnnnnnnnnnnnnnnnnnnnnnnnnnnnnnnnnnnnnnnnnnnnnnnnnnnnnnnnnnnnnnnnnnnnnnnnnnnnnnnnnnnnnnnnnnnnnnnnnnnnnnnnnnnnnnnnnnnnnnnnnntacatttgtgaaggtttttttttttatatagaaagaagttaatgacgagaatttcacattttaaattttatcccacttcaaattactattcatgtctaaatgcaagagaacaacttccatattacatactgttactgcaactcttgttgcttaactgctatgcctttcatacttcatcaaaatactagttttttgtgtctaattaaattaattacctgttacatgtctcgatttattatcatatattgtaacttgattattgttcttgagttttaaaatcatcatacaatggagtgaaaagaaaatgattgataaagattaaaaatttcatccaccaaagcattagatatattatcacatccaacaataactaaaattgttaagatgtattagtttatttgtatacacaannnnnnnnnnctaaatgacattgaactaatttagtttgataaatagttttaggttttagttctgaatataaatttgcactaaatacttagaaagtttttatcttttataattatcttaaaagatatttgtaatctcaaacccccattttcacccaaaaaaataacagtctatttaagttagattaatttaaacttgaaaaatataaatttaagaattgaatcaatagagatcaaatttaattgatttagttcaaattagatccgattgcttaaaaaaatgaaccaagataattaattacacacataataaaaaggttgatttaattcgggttaatccagttttaaaaaatataaatctaagaattgaactaatttaattcattcaaataaagtcgaacttaagaaaaaaaaatcaattacatatatatattcagattgaattgttaggtcaactcaatttaatgaacacccctaattgagggagtgggttgaatttaaatatcactttaaaaagttatataaatagtaaatatcatggtagcatctatgtttcccccaaagttattcttgttatccctattcagtttttataaaaagtaaaataatgatttaataacatcaaaactataatgttaccataaaattactaggaataagggatgtatattaaaaatgggatagaattctctatgtactctttttttttctttctttcccacgtctaaggtttaataaggaagacaagtcctacattagtcgacttagattagaatagaactttctacttatgaagacaattatgggtcttaaatagtaaatcccatccacacgtccataaataagggtcccgtgctatacgtaatttttctccactcgagtatctttctattttaatcggaattattgacttgatcatcaacttgagagtccatggtcggtccacttctttaacgacctcaagctatctttgaatagacaagacaaaactaatctaactttatcataaatgtagcctttgaaatacaaataaaatggttggccgaacacctaaaatcaatataataatccactatgtcaaactggagggagaagaacctctattatttgtttcatttgttatgtatatagaaaaattacgagcatcacctatgatgaatgataaaactgggaaaccattgggagcgaagtttacttagaaatataaaaagcaaaatctggctgtgcacacatacaaattaccacaaattcacgtagagaacatactaaaataaaggcaggcattctctcttctaaactcgtttaattaagaaaagggaaaatatgagtaaacagtgtttgataatgtggcacacgctctgttgtgcaatgtaataagataacctttgccattggtctatgttcatctctccctaaatatagtattcaaagataatgaacatgttaccatactagtgtatgttcaattgaaatcgtcggcgggaacctgttgttcatttcaaccaccgctataatattacaaaaacctttgccaaagtgggaaaatattaaattccaacataaattggttgacactggaaagagcatgctttgagagagataagtcagataaccacgatcggcaataacaaaaagctcgatttctctccccttgcacaatctcccaccagtctcccaccaaaattaccacccaaaatgaagggtataaaaagttgtcgacaagaaactcctaatatgctagtaatcaccaatacccaccatcattacacaacctttattgatgtggctactagaccacatacacaaacccactccccacaatgattagcactgtaaaatagtacaaaatgatgatggcttgaaacacgagtaaattgaagatcataaaaacacggggggagtaaaaccatcccgtaggcgtatccacgcctatacctaagatggtatgtaatgctatgaaaagaagaaagtcaatcccaagcactagtgaccccaggaccataccctccaccagcatacccacccgagcctccatatccaccaccactgccgtttcccgcactgtagtaatctgaggaacctctactgaaagagccctctcttcggaagtcacgaccaccaaatcgaccacctgatcggcggttcctgcctccactgaaagaagatcgagcagcaaaccgtgagagccaagcaggtacttcttgatttgcttcttgcatcagttctgataaagctctagctagcgatgaattgttatcactgaagaatgcagttgcaagacctttctttccagctcgtccagttcttccaattcggtgtacataatcatcaatgtcattgggcaggtcaaagttgaccacatgagcaacatggggaatatcaagaccacgtgcagcaacatcggtggcaaccaatatgggggtgttgccacttttaaatgacctcaaggctgattctctttcctgcaggtatttcagaattgatgagcacagcaagactaacaagtatatacttaaccaataatattgttgcaattcaaaaccaacagaaaagttagtaaatgctatgaagtaaaagggtttaatatgagggtagcaagttgaatagcaatttcctaacactaactacaaagcaaaatgatgcaagaatccaggaccatgaccctattaatgaaaaaacctgggaaaaataaaaaatacataagaatatttgaaagctccaggtttgaacaaacaaataatagggtaataatatcagagaatgactgcaaaagatgtgccccaaaaaaggatgtagaatataacagaatcattttaaacctaataatattgcctgtaaccaaaaacaattcttttataggaataaccacttgatagctgttctagacttctagtcttgaaatgtttgacttgcgaatcttgcaaggctcaagattctgtgttttgtattagagtcacgggaatgcagtagacagaaaattggaattcaataaaattgcagaagaaacataacaaaatagtttcttccattaatgcaatggtgcaacccgtctatttggtgtatcaagtcatctctaaataaaacccaaataaaatgttcaacccactttattagctatggagatttcttgtcctctgttcaggtaaaagtaacttcacacattctaatcttttctcttctctgttctgatttctcattttctcttgcttctctgttaatatgagacagtcaggttggatattcttcctagatgtttttagaatttagatatatagttttccttctccactattatgctaagggcgtctttttttctgttgcttaaaaatttattgattggttgctaaaatgaataactactttaaagacactttttatccctcaaattttagcaactggtggttaaatgagggaggagccacttaagaacataccatggagagcacaaatacaaatgctctaagaggcctaagacatgctcttttcttggcatactataactactgtccgtgggttacatttttaatgagaatttcgtttttgtcagatatattagctctttttctaagtgagattacaaatcttaatttgtgcagaattggttaaaccaaaggcatcggtttgagagattgcagttgtgagagtgaaaggaattattaaagaaagagttcatactcattcagggaacatgcgtttcatttcaaatggcaaacaattgtgactataaacaaaagtcaatagcaatatgggaaagtgaaatgtggcaaaaaaggggaattggggattcagttaaacgtttcatatttttaatttaatttttcatacttttaatttcatttttaacaataacacgcacaatttttcacagcactaaagcaatcttatgttatacaccaatcatcatagacgtgtgacaacccattacaagagctgtttatttttaacattcatgcaatagactaacctgctgtgacctgtcaccatgaatagtagttgcaggaaaaccattaagacacaaccagtgttccagcgaatcagctcccttctttgtctccacaaaaactaaagtcaaaactagctgcaaaaaaaaaaaaaaatcatgaatgaaataatcttaccacaatttagcgaggttttactcttaatgaagcacaacatgagtaaaatagattatccacactataaatcccccatacaaactgaaattcaaatgcaactttgcaaaggcattacctgacagagttcaaaataattaaaacaccataatccaaacatgtgcatgcatgttgctcagaatcagtttagactgtccggtagatatttctttacaaaaaaaagtttggatttttatactgctagttttgttggttttggtagaggtaaagaagctaaattttttggcaataagccatctatgctacactttggggtatacagtcagaatgtaattcttgtatctataaggagaattctatgaatgatcaaattctttggggacaagataaggtgttttggcttctacttgctgataacataaagctcgtggccattttagaggaatgttaaagagactgggtcagtaactttgtatgtttttatgtgctctcttgttttttttttctcttgtaattttgttttctcaaggaggatctcttatcttcatatctgttatagcatacatcttctactcatcttaattcttttaacaatatgcatgcacgagtagaagagtataggcatcactgagaactacccatcccaagtgggtcagaatagttaatgagacaatagtcattgtaaaaatctcgggtatttcttttggaaatgtgacactggacaacaaagaaaagctccaaattcatttgtgacataggtatatgatcattttagttgttctggcatttttttccaaccaaatcatctatgcattaacacaacttgaatcaattcatgacattcatttagtctcaaaaaatcacttgtaataagttctatgtaaataaagtacctttccttgtacaccatttgccctctgtgcatgaagaaggtccattaggtgacttctcttgtcagactcttgaacatactcaactctttggacaattaaatcagtacttgaacccacccttccaacagcaaggaaaatataatttgaaaggaaatcagaagccaatctctgcatatcaaccagaaatcataagaggtcttaaaagttataattataatatacacaacaattaggcattcatgcattgtttgtttatacctctgaagccacttatcatctcaaatcaaattaaaagcaaccaaattacattattctaaaggcactctttctgaaatagaagaggagggagattaacagcaagaccccttagatacaagtatgtgattcacaaataacaaggaaaatgcatatcagagcaatgacaacctacactataaagtaaaacacatcttcctgagatagacttccaaccagcactaaaaggagtccataatatatgcaggccctagagataatggggcaacaaaggaggagggggaagcaagccaaactgccccatgaagtaggaaaggtagcaaaattaagaaacacattcttattaaaaacaacatgccagataaaagcatgcttaacatgaaagcatattttacagactatatcagacctgtatctcttttggaaatgttgcactgaacaacatagtctgtctggcacctggtggaggcatgtccatttgctctacaatcttccttatttgcggctcaaaacccatatccagcatccgatctgcctcatctaaagccagatatcgaatcatctgcagtgaaactctagctctctccagcaaatctaccagtcttccaggagttgcaacaagaatgtccacccctctttcaagatcccgcatctagagaaaatataacttgttagggtaagggtatataccaaaacctaaaatttcttactatcatttaacggtaaaatttgatgggtcaatttagattccatattggacctgttaagtaaaatttgcaacaggatagaatctacaggagaatacatctacagtgataagtttgagactcattaattacaaggtgcagcacctccagcaaatgtactacaatatataaccacaaaattcttgaccaaccaatatccacacagacatatgcaaaaacttctcaagtacagaattgcaacattattggaagattgaaatcatgaaaatccaaacagtactgaagctcaaaatggatgtaacaaaatttcacaccatggctcactatgaaaccatgagactatatatgcttccaaacatgtacatacacattattttttttttttctccactctctgactacccacacaactcatgcttcacatatgatgtgttccctagtgttttcatgctgcttgcattgatcattcaaggtcataattgctgctgttatatctatattttgttgttgttccttgcatgtggactaacatggacattgtgatgtgtcctctggctatttgtgctgaaagggtgaaaactgaaaaatgagtacaacaaataatgaggttgttatgtaaagccactgtgtaagtgtcccttgcatacccttgctttcttttgactgttatgcgttgaactatggtttatagtgagtttttcttttttactttagatgcctatatatgtgtgtgtgtgtgtgtgtgtgtgtgtttataattttctctgcgtcaaaatgctaataaatctgtttttcagttttatgactttgttaactatataaaacatttctaattatttatcatgaatcttacaattaattatacaggtcggaaaacgagtcttctgattcatgattcaaatccctatttgacaaccataattaccaaacttggatctcaaatagaacaactttgctaggtaatttgaaacaaggtgtctacacaccagagagagaaagagctataataattgaaacatctatcaagaatataatgtcatagactcagaactagttgtgggagaaacaaagtatgaaataaagagaaacaaagataaaagggacaaaaacctgctggtttattggtgctccaccatatgcaacaaccaccctaaccccagtttggtatgaaaacttcctagcctcttcatgtatctgaaaccaaattagaacaatacaaatatattttcattgcagaacagtgtccaattaaaatcatagcataatacaaggtaaatctaactaactcacttgcattgataactccctcgttggagaaagaacaagtgcaagcggataccctgtacgcaccccacgaggtggcctctgcacaggttggcccctcatgattccactgataatcgggaaacagaatgcagcagtctttccagaaccagtctgggcacaagccatcaaatcccgtccagctagggatattggtatagcatgccgctgaacaggtgttggcttcacatatttgcaccttcttatgttctgattaagtgcttcacccaaatcaatctctgcaaacgtattcacaggtgggggcacattatcaccactggtctccactggaatgtcttcatatgcatcaaaatttattcctgtattctcctgctcactgaatgcctcttcagcattatcctcttcttcaaagggattgacttcccgttccctgccacgatcccaaccaccacttttgtttccccatccacctgtgcgtccaccaccaccaccatacccaggacgataatcatttctgggcgcattataacggtatccagaattaccagcaccagaactagagccagcaccagaggaagggacactatatgctggagcaggggcaggggattctcctgctggctgacggttcctcagatggggaggtacataaacaggtcgcgtaggagctaaagtgctaccagttccaacattgttagcagaagaaccaggacctgcgttttcagctgcagaatttgcagccaaatcagcccatgaagttcgcatagtcaataacaattctcgtagtcaacagttgtccgcaaaattcaaagggaaaacccctcctttccaggatcgggataacacctttacaagtcgcccccaattaaaaaaataaaacaaaaaaaactgctgaaacagataaatactctttaaaacgaacaaaattgctcagaaccagccctgcaaagcaacgaattccgatcaataaccgttgcaaacatatttacatcacgatatcacataaagcagaagccgatcagcagaacacatcaactacaatcgacaaagtctcaaaaatgcaaaagcacaaactaaacaaatgagaagaacaaaaaaatggatgcataaaacgaagttcattctcctcgaaatctcaaatagactatagcataagcaaaatggcgaaccaaacacaatgtctttgaaagacaagcacgaaaacaaccaaaacgtgaaaagaaaaacaccatagccgaagcaacgaggaaagaatgatagcaataataatagaggcatgcagattgcagagagagagaagagccatggatgcacctgggtcgtgttgggaaggtaaaaccctgaaacggtgagagcagtgacaaatgaagaagatcgagaaaacctaatttttggtttggttgcagaaagagaaagagaggagaagcgccttcaaaggttagaaacaacaaaaatatcttttctctcttttgtagtgtttttctctctcttctcaaaacttcaaattcaaaataatatataaactaacagtgtagaaaaaataaaatttaacattattactatcattcaattgtctataactataaaggaaatcagatagtttggtatccacatttattttcctattttttatgtcagtgtaataggatatataatggtagctttataatttttattatttgaagtcaataaatttgttgtcactaatttgaggtgtgtttatttattattttataataacaattacttaatatttatttggtgtctgtatttacataaagtataacattttagtatttttatttattaacagtaattcaaggatttgattgatgtgggattactctccaagatccttcacaactgtttttatgttgtatacatttgtgaaggtttttttttttatatannnnnnnnnnnnnnnnnnnnnnnnnnnnnnnnnnnnnnnnnnnnnnnnnnnnnnnnnnnnnnnnnnnnnnnnnnnnnnnnnnnnnnnnnnnnnnnnnnnnnnnnnnnnnnnnnnnnnnnnnnnnnnnnnnnnnnnnnnnnnnnnnnnnnnnnnnnnnnnnnnnnnnnnnnnnnnnnnnnnnnnnnnnnnnnnnnnnnnnnnnnnnnnnnnnnnnnnnnnnnnnnnnnnnnnnnnnnnnnnnnnnnnnnnnnnnnnnnnnnnnnnnnnnnnnnnnnnnnnnnnnnnnnnnnnnnnnnnnnnnnnnnnnnnnnnnnnnnnnnnnnnnnnnnnnnnnnnnnnnnnnnnnnnnnnnnnnnnnnnnnnnnnnnnnnnnnnnnnnnnnnnnnnnnnnnnnnnnnnnnnnnnnnnnnnnnnnnnnnnnnnnnnnnnnnnnnnnnnnnnnnnnatttcttaaaaattgtgattgttatttttttatttttgttggttaatagtgttttttttaagattaatacatagtgtgtttaacttttgcatttttctattatggactagctttttttatatatttcattcctactaaactttttattttctcctattcttttttgttttacaaattttaaaaaattgttttcaaattttcttaaatcagtttattttttcaacgaatcaatttaaattttaatatcaaaattaaaatggttagttttaatttttttttaacgaaacaagttttgattttaaaatcaaaatttcagtttttatttattttaatgaatcagttttaaaaacaaaattaaaatgggtagttttaaaatcaattgcaacttttttaagaaatcaatttcagttttgaaatctataacaagtaataaaaaaaaactnnnnnnnnnnnnnnnnnnnnnnnnnnnnnnnnnnnnnnnnnnnnnnnnnnnnnnnnnnnnnnnnnnnnnnnnnnnnnnnnnnnnnnntctaattgagtataatataaccagtggaaacacataacactaacagcctgtgtcttcatttctatttttataaagtatttttattacattaaatttgatacattataacatttttttcttattaatatgaggatgtgtgtattcattttgttctaaatatatatttacatgttacttaattttttgatatcacatgtaattaatttatcacttgaaaatgtgcaaattatatgtatatttcgtttcaagatttttgtggaatctatcactatagaaaatttatttatttattaaattgcacgtgacctatttaaagttaaatcataaataatcaattttctttctgaacaaataattaaaataaataataaatatataataagactagataatattgaaatttaataggatattgtgatgattaaatttgacatgtgcatattatgttggaaagacaaacaaacaaaaagaggataaaataaattaatgagaatttctggatcacgccgtcccctgagtcaaggcccaaagctgcatcaatctcattctcattattggcaaccaaaatcaacagtcccaacccaaacattaaaacatcatattctagttttttagtaagattaaaatatatatttgttttataaatatgaaaatgtttaaaatttatttttataaaatgattaatatatttttcgtcataataaaattaaaacgtgttctggaaaagcaagcacacgatccagaactcatataataaaaaataaagttaaaacttaaaagctctatacggggtattttttggaaaggggtaaattttaaaaatctacggaggtgcaggaagcaacagtcaagtttgagagttgggctttccggatcgggttgggcgacccaatttgacccaaaagtgacttaatccaaattttttgccctaacgcgattacgcgagtcgttttctgattctacgacatcctcacgaagacgcgaacagagcactcttcctctcgtctctcagttgctcctttattgtgatttgtgagtgctctgtatctgtatctgtaccattctttgttgataagaatataatatgatagaacttggtatctgctaagtttttagtactttgttctttagtcaacttagactttttggtaatgaatttgttgtgctagtgtagtcctagaagctttctgtggcatcattctgtgaaatagaaaatttattttgctacatcttagggggataaatttagagagatagacttgtagagaaatttttggaacaactctgatctcctggtttaataatcacaaacatcaatttgcattcagtgtgaacattgcttttcttttatttgttaaatttaaacccctttctgactttcatctgttcagaataatcttttgtccaaaattgttgtttcagttgatatcctcccctccaatgtcttacattttcactgattttattttatttccaatttgtctttcctcagattatgttaagtcccaaataatgtattcaaagagagcctcatcagttacagttagttctcttttgaagttgtgcaaaggatgttgctcacccaaaggccttagtacattgagtgctgttagcactgctgctgaaaggacagatttacagttttctggtggttatcaaaatgatgattcttcaggttaccagcaaaatcgtgttgggttttatcaggaaagccgaaataaggttgagtctaatgagctgttgaataagcaaagacctgattatgtttcccgagcaaatgcagagcaaaattcttatggagctggtcagattgcagacggaggtcctataaatgtgacccgaaacgttcacaatagtttggtgggtcataatggaagtgtcaatgggtactttagtcaaggcaacatgaaaatgcaacaaaaagttagggcaggtgttgataatgcatggggctctgggatgcatgcaaatcccttggttgagaaacatggttggacacacgaacctggacaaaggatgcaatctcccaacacatatagttcacctaggcatttagagtcacagggaaatcttagaggggacataaatcaaaacattgatcattttcagcagccacaaaatgctcattacaaagggagtcatgaaatgcatcaacagtacccaggttctggacagtttcagcagagtctaaaagatggtcggtatttgccaaacttgaatattgcacaaagatcagtggttggctctcatctatcaaataacgcaaatcatgatggcgaatcagacaatgcatctaatgatagtccatatagaggtacacttgaggaattagataatttctgcattgagggtaacgtgaaggaagcagttgaagttttggaattgttggaaaaactaaatattcctgtggatttgccccgatatttgcaattaatgcaccaatgtgcagagaataaatctcttgaagaggcaaaaatcgtacacaggcatgcttcacaacatctgtcacctctccaagtcagcacatataataggatattggagatgtatttagaatgtggttctgtagatgatgctctcaacattttcaacaatatgccagagcgcaacttgactacttgggataccatgataacacagcttgccaagaatgggtttgccgaagattcaattgatctatttactcaatttaaaaacttgggactgaaacctgatgggcagatgttcattggagttctatttgcatgtaatatgctgggagatattgacgagggaatgctgcacttcgagtccatgagcaaggattacagcattgtaccatctatgactcattttgtcagtgtagtagacatgattggcagcattgggcatctggatgaagcctttgagttcattgaaaagatgccaatggagccaagtgctgatatatgggagattttgatgaatctctgtagagttcatgggaatactgggctgggggatcgttgtgctgaactagttgagcagctagattcttctcgtttaaatgagcaatcaaaggctggccttgtacctgtaaaagcctcagacttgacaaaagagaaagaaaaaaagaatttggcaagcaaaaatcttcttgaagtaaggagtcgagtccgtgaatatcgagcaggagatacttctcatcctgaaaatgataagatatatgccctgcttagaggtttaaagtcacaaatgaaagaagctggctatgttccggagacaaaatttgtgttgcatgacatagatcaggaaggcaaagaagaagctcttcttgcccacagtgagagacttgctgttgcttatggtctccttaacagccctgctcgtgctccgatgagggtaattaagaacctccgtgtttgtggcgattgccatacagcactgaagattatttctaagcttgtaggcagagaactcattattcgagatgcgaaaaggttccaccattttaaggatggactatgctcctgcggggattattggtgaacataaacttaggtactgcctgcctctttctttttgatatttcccttgttatttgattggtagctaataaatttatcggaactgaaatgtctgatttgtgtgagcaaaattttatacttcagaagtagttaagctcaacttacatgaaacaaataatccactttctgctccctacaccccatgtttgttgttcaatacagtatgcttagtttttagagtatgtactatgtacaattatgatatgagttttgccagtaaaactccagcatagaggtactttattgcgactatactttttccaagctgactaaattgttagtcataaggaaggctaggacttattaatacagaagagtggatggtatattctcaaagacttaaaaactgtcagtttgttagcattacaaactcttaatgctttggtaaaagcaaagagtgcatgacagatacatctccaattgatgcttaatatatccttattctaatgttgctttctaaaatagatcaaaatgggatttccattttcacttctaggagttgctgtttcatatttgggcttatgatagaaaatggagtagaggccaatgtgaatttgtttgaacaaatgtgaaatcatgggtcctgattttggatcctttccttttcttattaagaatggggcagtgttctgatttaagagacaaatatactactagtgtctatgtatgactggtggactgttgcatgggtaatggtggtaatgtggatttctatgatgctgtttttaaccttttatcttacttggccttttggtatttttgttaatcgtgttatgaagcaaaattaaggtaagcctcacaacaatcttgttatgcagatgtatcctgattcctggctaccagatggattgaatagaatggctgttggtaggtaacccctcaaggctgcagatagggaaattgttcatatatctcacggtcattaaattaaaatcgatctttatatccgcaaggagattggaattttgtttaaccaggctcttccacactattaatcaagcagtggatgtgcattcaagttgcagaggcattattcattgagtagttttatataattggttgttttagcttccatataagatataaattattattgccactccaggcaagggaaaaacttgtgtagttgatagacaagatttacattcaatggtataatttcagacaacttttttggctgtcaaaacctcatcatttacctcaatctcaaaatccaaatcatctcatttatagtctaaacttgtttgtcttgcattcttgcttgcctcttctgtgtcaaacttctcgctggtgtgcataattggacgtttcctgcttgcatatatgtgtgttggcagtttgagttttgatatggcttgctaagtgggagatagctgtcttattgtttttggtgcttagagaactagggatttgtaggtcaaaactagtacatgggtactagtctacttgctgattaaaaaaagggtacttatctactctctttttttggtgttgagcaagctgcttgcagaagccttgttggagcatttaggatgcttcgatggtggggtgcctctttcgtaatagttaatcatgaaggaatgatgaggtctctccgtgtgacaacaagttaatgtttgtgataacgagttgaataggaaatgggtaagatgtactttaatgaggacattgacacaaccacgtgtgattgttgtcttagcaacatacaaactcgctttaggcatgggagcagggccagaaaattattttaggtccaatgaaagacttatgttaggcttttcaagggagagggagaaaggataataagaaaatggaaaaacactgaagcgcgtatcaagtgattgaattattgtataagcaattcatgtctcacaactcatactaatggagctttccaaaagtactcatataggagaagaacaaaataaaattaatttcttcaaaagttaaaattaacttatatataagttaatttgtaaaaactttgtcgtattaattctttcaaaaactaactttttgcttgtgcataagctgatggtgatggcggaacacctgatggtggatttcgatttggacatctaagttggaagagatgacaattttagtgttttttaaaataaaataaagatgataacgtttattagttattattttaaattaattatttcaaaatttaaaattctgacaatcttaacagaacactaacattgacagaaaacaaatgatataattaaaatgatattttttaaaaatatagatgatgaaaataagagttttgaaatttaatggacaaaaaaaatactgacatttagctttctaaaaacaaggtaaatattacgagttcacttttctatatcttcgtcttatgtaaataacttaataatagtaaaaactcttttttatttttactaaaatcttgtgtgacttaagctttcgatataaatttacaaattcattttaaattttaaaatataaattttagttacatttttttaagtgttctcggtgatattttcccattaaaataaaaaattatttaataatatactttgatattataatttagaatataaactcaaagataaattttcttattagtttcactctcacatagatttttaatatttttttgtgtatttcatatgttaacaataattctatctcaattttcaactattttaagttatcctcgtctcatccttctatgtatatttgatcttttgtttgtctgtttcaatttatctttcataattttttttaaatgttaatagtaaaagaataacttacatcataatttaaattatttattatacatataaaatataaaagaactgcccctaaagttacattttaaaagaacttaacaatttttaaaatccaaacctcaatacacccaccgagtcccaatattgttgttgagcatgagcgtttcaattatttgtaatttcaattttgcccccgaaaaaggagtggttatcgaacaaaacgaagcctccaaaacgctttggtttcttcaccaccaccatccttctcctctctctctctctctctctctctctctctctctctaaaaaccagaaacaataaacacaaaccgaaaaggcgaaaggggttttccgagtgagatctagggtttccatcgatttggagagaggatattgatagaacgacctcaacgaacaaggtcaggaggtggagtactagaacatggattcggtgcctccgaattcgcatggaaacctcgatgagcagatttctcagctcatgcagtgcaaacccttgtccgagcaagaggtaacgttattcccgaaaccgcttcatctcgctccgttttatttctttcgttattatgaaatgcgatgcgcggatcgggaaaatctcttgttatttgtcatcagttttgtgctttttgctccaattgcttctcgtgcatcgatccgtggcttgttgtagcgaaaattgaatcggttcctctttgtgttaaatctggtttctctcggaattggaatggcgactggaatgcgcgtttgttcgaatattccgttagatttgcagaattcgtggtagcgattctagtttttttttttataattattttacattgattttgattatatcatgttattgtggtttttcagttttagacctaaatcaattggtcgcaattaatggtgtttttcttcatttaaggtgtggatattttagattgttaacattgactgagaattatttgaggaggaagaatatatttctttctctatgcttgagtgtacgttaattttttatacgataactttttacctgtcttattagggagggctgtaaatactctggattttggatacttcctgttaacttaagcgtactcttgcaactttacttaaggcagagtttagttttttgggtgtaatagtggaaatgttgatgcaagttaggagctatgatttgctacttgagctcctaagaagtagaaaatacacaatttgtttgtattattttcgtcacaaaaagttaggatagttggatttgctctaagtttgttgatccacggattgttgtttatgagttatgagtctatgcttattgcttaaggaagggttagttttcatttttgtccctagttgattgcattggtttttgaagaaatttaggcatagttttcggtctagagtcagggatacagctctgacattacatacgttgcatgacgtttgtcttattttggtacttacgaaacagcagttatttaatgacacatttattttgtctcctttgaacacggaaggagtcagcaaagctgaagggaagtattaaaaactgctggatccttgaatggacttgttaataattaataattaaatgagtaagaattccttgctactttctcctactgagtatcttgtaaagcatttgtattaatcaagttaaacatttccaattagttttgcttttttttgttatttgcacgtgccatcatatttgatcggtgggattcagggagttagaggaaagttctacctaggtttttgcgggttcagatcaattttcttttttagcagagtaagttacttgtggcaacctgtgctgcttttgtggtgatgtggggcagaggatcctatgaccactttaatgctctgttgttttgtgttttttgtttctcacagatcacggctgaggtagcggcctttcacagaaaaaatcacacctattagaagtcacaactctgaacaggatgaatccttgtttttctcttcccttcttattatggccattgatttttagggatttttttttttacagtttaaactctttgctaaatcagagggatttagggttgaaaacattgaatctctacatccattaaagtaaaaaataaaaacccagcattcccaccctcgattcacaattcagtgttcttttgatgtattttcctggtttctaattaacacttaaaagcccaaaccatagttgtcaatagtgtgtgattattgtgacattgtgtcatggcacttggccgcaacagaaaagaatgtcttctttctggaaatagccttgccattgagatagtgttgtgatttttttgatttagcgatccaactctgatttcactttgcacttgtgtgtacaggtaagggtcttgtgtgataaggcaaaagagattttgatggaagagagcaatgtccaggtgagtctgtctattttttatcatttatgttagcatgtttatatttgtgctaggtgtagggatttttttaaaaattggttcatatgtcaccaacattgtttgcatcaagcccctttttcctctcaatttgtgaccattatctgttaaggaggtcttattatccaccatttatattggtttttactttgtttaatatgtttatttgtagggcttttagctttaactcatgatgattttgaatgactgaaaaaactaaagagattatttcatttgccaataattgcagcctgtgaaaagtcctgttacaatttgtggtgatattcatgggcaattccatgatcttgcagagctttttcgcattggagggaaggtattctttatgatagttggttttacattcaacatgcatttattaattttgtgacacattgactacatagattttataattatgaaatatgtagtacttggaaaatcaggaaattccatgctccttagtgttgtattgcgaaattaggtttggcctatttcttatttcatagcagaaagtctaattttttattgagaaacaagctgcagtgttattgccaatgagttgcatactcagtctctcattctcttatttcaaatttgagatcaaatgtgctatgtgcttattttattctcggttgaaccattattttttagcatctcacccttgcatatttaaatacttttttttgcttttagttgaaatatggaacctctttgttaaatactgattcttgttaccatttttgttggtagtgtccagatacaaattacttgtttatgggagattatgttgatcgtggctattattctgttgaaactgttacggtaaatatttattgtttttttagaattcaacttcgttctgacatatttttattgttatttattttttataagatgttatgggattatttggttaggatgttctactgaaatcttataggtcttagactaattgaccaagcttgaattgtatttttttttaatcagtaatttgatatctgcttagaggattagaaaattacttggtttatcagcagtagttttttacctaaaaatttctgttttctggaccataattctaatattcctttctttgtgtcatactcctacaatgagaatgattcattactattcatgctatatgccatgtgtatgggggtttattggaattattgggtgccactattaaacttttcgtggttgtgcattgtgctatccaaaataaaaaaaagtaccatgattatgttgtatgtgtaaataatgcattatgtctgtagtataagtgggataccaatgtaacacactgacatataagtaaacattgctgagcaaaataaataaatattaacatgcagagatgtgtatgacattcaaactgattttgaggtacatgttgatattgctattttttaattgcgtagtttagatggtgtatattttgcttccatatggtatttgtttgataacattttgggtgctaattaagtcataatgcagcttttggttgcccttaaagtgcgttatcgtcagcgtatcactattctgaggggaaatcatgaaagtcgccaggtttgttcttttttaaatcatgtgatcttcctgttagtagtgaattatagattagatttaaaatcctattttggtgattggaggcatggtcacttgtcagtatcagttgtttttgacagattttttcttatcaatatactacccataagttcatattgctgcaatgctgccaatcaaatgctttcacacatccagatgaaagaaattatgtagtattttgggaaccaaatatgcttgtattaaaaaatgataccatggatttgataaagtagttggagttagaacttcttacttttaaagcaacttaatatagcactgattacagcattgacttaattgtttgttcagttgttttgtatgctttagctttgaatgataatggctgttcttacctgtctgttgcagattactcaagtttatgggttttatgatgagtgcctgcggaagtaagtacctgctaagtccatggctgaggataagcaattataaaattgcaaaatgattccaaattaaattttgtaccgaaagttgatctggaattcatattattttgctaatcttttttttctcattttaatccttctttttataactttcattcttgaagttgtgcaatcctatattggtgaatatttttatttcatttgcaggtatggtagtgctaatgtttggaagatctttactgatttgtttgactactttccgttgacagcattggttagtatactattacataattttggaaaggactgggatattttgttagatggtcattgttcttagttccaaggtagtttgttcgattcaatgatcctgggcaaccttagtatgttggcttgcatttaagattagaccatggtggaattgggtggtatcactgtgctggattgtggaatctgttggagcagatgaccccactgtctttcaaaaaccctatttccccctgattgggaaccatttcagatgacctggtgaatgaaaaattgaatgttgccaactgagattcttggtctggttgtgaccaattttggaaagaaaaaaaaccttgaagcttcatctcatgtgacatcaattcaatccaattcttctaacttttcaatcttgttcaaacccatctagtcctatctgttatttgatctgttttggagctttcttttgaagttctttggtctgttcgtgttctagagcatccttgtgatctatttgtgctctgcctgctatgtggaacccatggctgtctgaagaagctagcattgtttttgtttctgaaacctaagaaatgggtttttttatatttaaaataaacacttgaggatcttcagactgaaattttatgttccatctccttcagcatcttatatttttataattactatcaatataaaagtaaattgaaacattaataatttttaataacaaaaatatgaatttatatgctctcacacatatattatgaattttgtatgatcttatgatccttgctaatgtgccatgatttatgatctttagcccttcccaatcctgagtaggatctcaatttaatgaccttgtctagttccatgtgcattttgttcttggtactctgaattcagtatgcttcttttgagctttgtctagtttaattgtgtctcttctttttgattaagcttcatgatattcttctccatcaattgcagtgctcatatttcactggatttctagttttcaataactgagtgttgctaaagtgtgatatgtttactttcataggttgaatctgaaatattttgtcttcatggtgggttgtcaccatctattgaaaccctggataacatacgtaattttgatcgtgtacaagaagttcctcacgagggacccatgtgtgatcttctatggtctgatccagatgatcgctgtggttggggcatctctcctagaggtgctggatatacctttggccaggtagtcctgtttgttatgtatcaagcttgattgttttcatctgtcaccattgcttttttttattgcttatgcatattgtttttgtaggacatatctgagcaatttaaccataccaataacttgaagctgattgctagagctcaccagctggttatggaaggatataactggggacatgtaaatatttgatatcattttgtttgttcttatattcattcgttgtggtaagtagttgatttatagtcccttgttgcaggatcaaaaggtggttactatatttagtgcacctaactattgttatcgttgtgggaacatggcatcaattcttgaggttgatgactgcaaaggacacacattcattcaggttgagcttccttctttttgttatctactcaagtaatatgttgtggatctgtaactcttttttagtcttttgtacatatgttaatattttttttaatctcagtttgagccagctccaaggaggggagagcctgatgtaaccaggagaacgcctgattacttcctatgatactattttggtcgagttgctgttaccagcatagcaactaatgccctgcagtaatgtgcaagctcatcttcttgtccaaatcagccatgaatcacattgatacttatatttttgaagttaggcttcgctggatgtgttatttagttgaattataactgaatctttccaagtggaagctgagcagcaggcgatgctattgtgggcatgtgtatcattccagcttgcagtgtatcagttttaatgtttttcccccattttttcccttttctatttatttgcaagtctcttgacctttcttttctcaatttagtattattgttaagggggtgggtttctgtagattgataatgcttttaacatatcttttaatggtgttttatgattttttactcgtcttgtaagaattatattctaataggtagtcttgtttttacatgaaatgactttcaatttttctaattatattcgtactctgcgaagcttggcgaaaatcaatcgagtttttgtaaactatcgtatgacttttttgaagagaactattgtatgacttgataaactttattgttatcttgacatgatcttctgtttgattattcaaagaataataatttgctgtcctctatgcaacttatggctttttgatacattgggaaaaactttttgttgcatttaatttcagaatggatttctcattagttgcaaactattttttagcacgtgttggaaaatgaggtcgagatgggtggacgcactagtgcagttgatcgaatttaatttcccttgatagaataaaaatgtgggaaaggttctattgtctaaatgataatcttggtacatcctcaagtggtaacatttccgagtgtttctgtggttttgggcaagatctcccacatgactacagtcgtatgtcttgattcagtttcatcgttcaatagaattttccataaataattaaatttagaacttatatttcttacattacaatatcgttcatatgggttctgtaaactcgaagtgtacttacctgccaaggctatccttgtcaaccaaaacatatcattagccgcaagttcaacagaaacttaccctggtaatctgcacttcgtaaactccccatatttcaattaacttcttgagaaaacatccttgagttcaaccaaactggaaaagttcatcacaaagaaaggtagactcttaatgcactgaaccaattactagtatttgtggttgagtttgttaatcgggcagaattagttggacaaataataattatcttaaccattgaaaaataattttaatcagttgatgtacaaatttgtacttgtcagtgcatgccttataaaccttaaaactaccactattggtattttgatacgtatcacctctgatactaatatgggatagatattatagtaattggacaaataataacatgtttttattgtgttcacaataatcagaaacaacttataaaacattattgtctttattctaacttctaattcatgcttttatattaatattacaataatttcgttatattaatttttagaaacttgtaatggtgatcccatatctcatatttgtacttgtgtttccttaaatattatcggtatttaaaactgaaacttgactaattttttaaagaaaagaaatggaagaaataaaactctccctctattagagaaaaaacaaaaacaattggaaagagatttcaagaccttcatttctcttctccatcccttcaaactccttaaccgaaaatgaacaaattttatcaaaatctcattcccctgttccattcctttccagccgaagagtatgtaagaaacacttagaatgagcactatacagcaacaatagtcacggtattgataattgtaagttacacctggtttaaaaattaaaccacttcacaagcgacaaaaagtacaatgttacatatcacttggtaactttgaatccagtgttataggcttgaatgcagccaacaccacagaaactttacatgcaagaaatcccaccattccaactatgagatcttttggtgttagcatcacctgaagatctcctgagctataccttgatgcaattacagccaagcctagagccaatgctacacttgctattggacccttcactcctctgaacaaagcatcagttctttctttgtcattggtgattaattctgaagctggcaattcatccactgatctctgcaacagtaaaagatacaagaagcctccaattccaccaatcaagaaagcaatcccggtattttccccagccaagagggaagcaactgatgtaccaaaaagcatcagcatggcatcataaaataacaatgagaacttcaaatctgcgtattctttcatgctctcttcatttgagatctttagaacttgagagtaagttagggtcattaagtcctttgttgaagatgcttatgggatcaatcccttccagctcagtcacaaggctaggtcttaattccaacatggacagatcagctccctcaccaagcaacacatcatcaatctgaaagtcatacaggaagccagtatacgttggtaccccatcttccggtccagatggttgcccttcacaattaataaccattaaggatacacttcctaggcgccactgacctgaccttagagacagaagaagggtattgttagaaagcctaggtttaaacagataaatatgggatgaactaatgattgtaccaacaattatttcttcatgtttcacaaagagcatattataagcttggtggagggttagacctgttgtttagtctttttactcttcatctttcccctccttcttttccccttctttgcttttgtctttttcttttcaacctcctcgtatctatcattggattcatctaccactgaccccaattagctaggattaaaggtgttgttgatgttgttgtttcacagagagcatatattggttgcataggattaaaggtgttgttgatgttgttgtttcacagagagcatatattggttgcataatgatttaaaaactggaattcgaatctaagatgccagaagaaatataatagtatactggcttcctagcacagaatgcagaagggatattttccttggtacttaaaaacaagtttctcggcaggagtactagcaactcattctctcatacactttgtcctaatgatttaaatttattagaaacttttcaaaatcacgagtgagactcattaaataagaagtaaaacctacaacattgtgatttctaatatatttcaactaataatagtgtattaaaaaaagtgtgttagagagtatattgttagcatttgtcttgtgggtagacaagcctgttaatcaagggcactttaaaattgtaggtcaggaatgatgtctatgaatattttaatcatttgaaaacaaatagacaataataacataactgattcaacactgacccaaagagccttaagttgtgcaattttaggaccctcaaaaatgaattcatctaacctctttggaaatgaagcatgtcaatattagtcatatcccctgattctgtagaatgatccatcatcaaactcacagcgatcctttgcaatatggaatttccattttcatctatcaagcatagtagaattccagcatttaagtcactaatactagagccatatgcgttgcttgtaactaacttgaccctaaataaagatgtggatccatcctccttcaaagatgatgaaatgttctctactgatgtatttgtgtacactttcacttcagaggctggcaagagatgtgaaggcctcgcatagctctgaaaatctgtggaaggaaacatcagagattgatgaataaactaaaatattatgcaacatcacaagtacttctttagaacattaatgatcaaaatgtctactttaatggtcttcattgaaatggtcttcattactgaaagatgtgttattacgtcataaccctttcccttaccatctttcatcacaaattaggagtaaaaaaatagagaaccattgcatgtgaagggaaaagaaatcactcgggtctgcatttcaaattaaattagttggcaacctagataatcaatggaactacctctgaggctctgatcaatcccataaattagaaaagggaagtacattttggtaaaaaaaaatgtggaaagcaatccatgttagttaataccaggccttggacccaacaaatactaaactgattagttttgccaatttaatagaagttggttaaaccaagcttcacgtgtgtatgactcaagttaaagctaaaaaaagaaggcaagattccaggatactaaagtgatcattgactacaaatttttgaacttttacataaattaccctgtaaatgcataaatcagatgaagccaacaaacacttggacaaccaaaaccaaccaattagcttcattgcaataatcttttacactataatacctggcaagttgcaatcataattgcagcattaaaaatgtgaaggatttgattaatacttcaccccactaaagcaaatgacgtgactatataataattgactgtgaagtctatgatcaaaaatcataattgattatgatcattgacttttagggacaactgaccagatagatgcaaatccgtataaagagtaaaccgtatcttaacaaccagcatgtattttataactggattaaatcctctcatgagatttttgtacgaaaaaattatatgaaaatttatatttgattcccctaactttagaggaaaaagtcaatatttacaatcattaattgaaaaattaaaagattatatgatgataaaatacattcaaatatataataaacaaggaaattattttaatcttaatgtttgattttctatgagtaaatcattgcttttgtatatgcatgaagtgaatccaccgttttaaaggacacaaaatcttaaaaattgtatttacataagtactattaaaaagacaggatgctattaaaattcgttaaaaaaaatattaacagagaggtacagagaatatcatccattcccataatctatcaataacgaagcaaactaaaattgaaattaatttggataaagctaaaagttaaacgtttagatttttaataaaattctgcagaaattgttacgtgggtaccttgaaaatcagaaggagatagtctggcccgaacagcaaagcgtaaatatctgttgtgggtaggaacccttcttgttgatgaagaagatgatacttgtatgattgttttcctttgaaaatcatgagagtgacacgttgaagctgaaggtatcacagtcctcacatgaattccctccgtgcctctatactccaattcaggaattgcagtgcagtttagagacgcaactgaactacagacatttgaatccatgaaataatcaaagagattattataaagataattttaaagaaaattgagcaacttcaacaagcgtttgtagtccaacggttaggataattgccttccaagcaatagacccgggttcgactcccggcaaacgcaaatttttttctcgtttactttcgttcttcgaaacaaatgttcttactaattgcatttttagttttatttcattagttttaatgttatatgttgataaattcaacaaagccacaagacccctaacacaatatgaattcttgaacagtatttcaccggttttattctatatgaattatcaattatcatgatgttacacttaaaaaatagtgtatttgataagatatttaagttaatttttaattttttattggatagaaaattttttaaaacttttttatgaataagtttttttatattttttagaatattatttgaaaaataatattttttaaatattagcttttagatttttattttttttgtctttaaatatttattatattttttaattttttaatttatgttaatattttattatttttatcttttgtataattttgcatttttagttatttcaacaaataatttataaaacacttgtgattaaataagataattttttaattttcaactaaaacagtttactttttaacttttagctaatttttcatataagtttgttaaacataatcttaagacaagatattttaattaatttataatttatttattaattgaaaattttgtttgattgttcactaaannnnnnnnnnnnnnnnnnnnnnnnnnnnnnnnnnnnnnnnnnnnnnnnnnnnnnnnnnaatattaccttttaatttaaaattttttattatttttctttttatccttgatatatttatcaaaaaaatttattattctttttatataaatcatgattttattatttttattattattttatctatttcaactattttaataattaattttatcaaacacttatatttaaaaaagataattttttaactttgaactattaattttaaagtaattttttattttttagttaattttttaattttcaggtaattttatgaaagataaccttattcattagttttaatgtcctaaacggaagggaaagtgctaatgtgatgaacttgcggttggaattgggaagcatgttacggtctgcacaaggtattaggcaccgactaggggcaattatagctcaactcaaacaacccaaataaagggacaggggatggatggagttgtacctatcaattcatttgagaaatgaacattaattgcttcaaagaaactatattgtattaactattcctttttaattgttcatgtccaaattgtttcaactatactatattttttttattagtattaaatttaatgtataatacctaaaaaaatgtataaacttatagtacacgtcttgaactttcctttttaataaaaattataatcaacatatttttgttgaattgttgaacaatgtcaaatgtgaaattaatccattcaaacatatttttcaattttattaagtatgttggaaatgattgatttttacatttagttgatatatatcatcctttttattgatattattatgaacttaatttttatgtattgacaattagtataaatacgttttatattgtgaactaatctaaaaacatactgaataagacttttaaaataattattataaaaattaataaatttattataaatgagaatttgcaattaaatgttaatatattttttaattctattaatgtggactatttagtgtattattatttcttttattaattatagtcaaacatatttgattaagaatctaatattatattagaaaaaagtaatacttttttgtttttctaaaaattataaaaaataaattctaaccttattatcatatcatcgaatatattgattaactagtatggannnnnnnnnnttagaacaatagttatgaaattgtttaaaattttgagtatacaatatgttttttcaaaattcagtacacacaatcttaagttgaaatttgagcatacaaaaaggtaattttggtacactgttagatataatctaatacacacgcgtaaattagctaagaaaatattaaaagtaacaataattttatcatcttaaatttcaatattcggttatgtttggtaaacaaaacaagcaagaaattttataaacaaaaaaagtgtaagatataaattaattttttagtataagtgatgttaaaaaattttaaaaaatgaaaaattcatgactcatcaagtcaactaagttattaattcaaagtcaaatcacattgaatcaaattaagtcattccgggtcaagtgcatatctaatccaacatgtgatttgaattggatatttgattctcagtccaatggattgatctccacttattattggactgatctccacttatctgaaccaaatttaataattatgttttgaagtataaaaaattaagagatatgatactttaaaacttaaaaaaaaaatactttaaaacttttaaaattctgtgataacaccataaatttattatacatttaatatatttttaataataacttattaccaataattataaaatgtgtcctttactagttaagtttttttnnnnnnnnnnattaattaaatacacatgtggtcataaaaaaaactagtgtcatcattatatcatataaaacaagttgtgtaaaaaaaaagtacaaaccaagttgttatcgattgagattacctacaattaccagagatctcatccattaagattgtttattagatgataaaaaaaatagtgtataactatatttcaataaatttgatgcattatataacacattaacannnnnnnnnnnnnnnnnnnnnnnnnnnnnnnnnnnnnnnnnnnnnnnnnnnnnnnnnnnnnnnnnnnnnnnnnnnnnnnnnnnnnnnnnnnnnnnnnnnnnnnnnnnnnnnnnnnnnnnnnnnnnnnnnnnnnnnnnnnnnnnnnnnnnnnnnnnnnnnnnnnnnnnnnnnnnnnnnnnnnnnnnnnnnnnnnnnnnnnnnnnnnnnnnnnnnnnnnnnnnnnnnnnnnnnnnnnnnnnnnnnnnnnnnnnnnnnnnnnnnnnnnnnnnnnnnnnnnnnnnnnnnnnnnnnnnnnnnnnnnnnnnnnnnnnnnnnnnnnnnnnnnnnnnnnnnnnnnnnnnnnnnnnnnnnnnnnnnnnnnnnnnnnnnnnnnnnnnnnnnnnnnnnnnnnnnnnnnnnnnnnnnnnnnnnnnnnnnnnnnnnnnnnnnnnnnnnnnnnncaatctatcaatactttatatttttagagatcatatttttagatatcaaaataagtatttattcacaaagatttggtttgtttttcaaagtcaaagatatgtacgcaataacctaaagcgaatattctacatattgaattaatatatttagaggaaacatattgaattaatatatttagaggaaacatattaactccattatatgttcaataatcaaacctaaatatgaatgtggtttattctgaactcgaattcgtgggttcaactaaaaaacttaaatattggatattgatatgatttataatgccgtacaagaaaaattatagattaactcctatatatttaattcaatgtccaaacctaaatattaaagtggtttattcaaaactcatgggttaaaataaaaataaataattattggatattgatatgattataattccgtaagagtaacaattatatattaactcctttatatttgattctatgttcaaacctaaatattaaagtggtttattcggaactcgtgggttaaactataaaaaatattggatattgatatgatttatatttataatgccttaccagaattatatttaactcctttacatttgattcaatgtacaaacctaaatattaaagtgatttatagaaagaaagaaaaaagtctttattaactggagtccagtccaaaacctttttgcagtgacacaataccgtaatgtttttcagggagagatactcttaaaatttaagggattataaggaccgataacaactccctgagcacaaacaaagtacttgacggagaacaaaattaacaataacatgagaagctttctcaatgggcacacttgcttttcctcctcccccacttaaccattgtaaagcacacatcaaacaaactagccaaaaattccatatatttcaaccatgtgaattcccaaattgagtgggttcacaataaatgattgaaataattacaatgatgtgaatcaaccaaatcatttgacataaaccataaccatatgtttcatgtttcatgattaggtgagttttaggtggtattaaaaattaaaaaagaaaaggtatagaatataaaaaaaaaaaaacatttaaacacaaaataaaattaaaatcatttttccttaaacaattagaacaacttgacagagaaaatcatttcttcaattttatttttgatgaatatttcttcggttgttgcataaaatgatcaaagttttgctccataaacacgttccaagtttgacgaagttctttagtaaaaaaaaaagtgttcaactaaatcgaagcccggaattaagaatttccccacaaaaccgggaccagtaattagagtacacgtcaagatatcatgtattcgctttgttggctacgtttgtagttggattattgcaagcataattaattaaaacgtctttgtgagattacgcaaaggaatatatatatatatatatatttttatttttttatttttttcaattccaaccctttgattggtatcttcatcttataactagaattttgttgttgaagtcaatcattcaataacccaacatggaggattcttccctctacacttcaactccaggttcccagcagcaacatcttctaaaccatcatagagaagggtcagagacagaacaagatggttccaagaccaaatcacacaagaagctagcacttctccctttggtttttcttatctattttgaggttgctggaggcccctatggtgaagagccttcagtgggtgctgcaggccctctgatagccatccttggctttgtggttttccctttcatttggagcattccagaggcacttctcactgctgaattggccacaactttccctggcaatggtgggtttgtgatatgggccaatgaagcctttggacccttctggggctccctcatgggcttctggaagttcttcagtggggtcatcaacttagcctcatacccggttctctgcatagactatctcaaattggtgatccccgctttatcttctggcttccctcgctctgtgtctatttttctctccacttgtgtgttgtcttttttgaactattctggtttggctatagtgggttatactgcagttgttcttggtgttgtttcacttttgccttttgtgttattgtctttgttttctttgcctaaaattgaccccaacaagtggctaagttttggtcaagagggtgtggagaaggattggacactttacttcaacaccatcttttggaacttgaacttttgggacaatgctagcactctagctggtgaagttgaggagcctcataaaactttcccaaaggccttgttatctgcagggctgcttacttgtttgggttacataattcccttgtttgctgccactggggctatgccacttgatcaacaaagttgggttggagggtattttgcacatgttgccggggtcattgctgggaattggttgaaaatttggatggaaattggtgctgttttgtcaataattgggctgtttgaagcccaactaagtagtgctgcataccagcttcttggtatggctgatttgggattcataccaagaatttttggagaaagatctaagtggtttaacactccttggatggccattttgatctcaacagttatagcacttggcatgagtttcttgaccttcacagagatcatatctactgtgaatttcttgtacagtttggggatgcttttggagtttgcagctttcctaaggttgaggaggaaattccctgctttgaaaaggccatttcaggttccattggggttctttggattggtcataatgtgttttgtaccatctgtgcttttggtgtatgtgatgagtgttgcttccaaaattgtgtatgtgactagtgccttcttgacctgtcttgggattgctttatattatttcatgaatctttctaagtctagggagtggcttgaattcagtcgtgtgggagataaattgggtgaaaatgattatgttttgtagaagtttggtatggttgctttttttttatggaatctttgccaaaagtatttgtttggggtagaagaatctttgtttatactgtgtgtatatttctgcgggagaaatttgattctcctcagccattatgttttaaagtataaatattgtcatgcaaatgtcttgatgacgatttaaaaatatgttaatattaaaataaaaataattaatgaagtatcaaataattgtacaattatgtaaaatattgtaaacagaatttactatttataaaaaatatcaagtgtgataaattaaacaattgattttgagtatacaccaaaagaaatagacatgtacccaaaaaaaaaataaaaatgagtcagtcccttttgtccttttttgcttttctctcgtgtacgtacgaaatgcctatttgtaacgcttaactgcttcctcaagtggccttggtaactgatggtgttaaagctgaaaagaaaaggaaaaatgtggacaatattaatgttgtggagtaattgacttatatacattgataattgggaaataactaatgtgtatatatatcttcgaaaaaaaaaattgagacatatatttaaaattactaatataaattttatataaatattcaatgtattatttattgtattgttaaatataatatatttattaaatttaataagtatgatccatacggattggcccatacagattggtcaattatccgtcattagtcgtcgcagctatgctcagaccacctccctcaacgccgtctccgccctcctctccttcccctccgccctcttctgtgatgcctgctcccgcagctgctcttactccccctgcctccctctgtgattcttgctctcctgttccccatctctatctctctcatccgcacaccacaatgccgtcgcacgccttatctccgcgccatcacccttaagatactcgccgtcgacaacgccatggagtccgtgaagagtggcatggtcctcggcttcagcattggctccacttcccacttcgtccttgacctcggcatccccttctccgtcctcgaccacaatccttgccatgatctctccatcgacaatgccgatgaggtcgttgaggcgatccataatctataaggttcttacatattcataattagtaagattcttacgaatttgtcaatctgtatgaggttacggattcatcagtaagcccaaacagattggcaaatccgtaagctcatacgaattgatcaatccgtaagaatcttaaggaagggcatttttaattttttgctgtcttttctgagtgtatgaagaaatttgtgttgtgcatgaagaaaaatccaaaaatcacacattgaaggagcaagaagtccgaaagcccaatatattcatgtgcacagaggagaaaatcttctaatttgaacaactagcccaattctctctctttgtcaaaaaaaaaaattacttccagcaataaccaaatagtttcattttgggtgttaaccattaaatttctgttattcaatcataaataattgtttaaattattttaatataattattttaaagatcaacaaatttatcatacataatggattataattaaataattgtataatttttttatattgtacataacttttttttctcattttaaaatatatgcaaaggtaattcaaatagttatataataagttagtttcattttttaaatgaaattttattttcatcctaataaataaaatatgagtactgttttttaatgcaagagttccaaatagttatatttgtacatgtaaataattttaaaattgacttttgttttcaaaagaagcttataagaatgtatacaaataatattaaaccaacattacattgacctgactaaaattaggtttgaactatttaaacaaaattacatatctaaatattgtgaatagaaaaaatattattaataaaataaaattctaaaaaaaattgaggattttcatatcataagttgttttctattttaaataattaaatcaaccaggataaatctattttaaaagataaatataatattcaatatttatgtttcattcacaaaattagaacataacactttatttaataaaaattaattgtccttctacataactaacaaatattaattagaattatgagaataatagtaatttgattttcaaaaaattacttctgatagtgattaatattaaagaagtgagttacttttttcatgagtgaatgtgaaatcgtatggaagtgggcaagtaaatcaagggaaagggataactcgtgactaacagcgttatccctagctggctttcggtggaaagtaacgatctttcttcttcgggaaatgattgttagagaaaaacaaaacaaaaacagttacctgactacactttcagaatcaagtcgaagctccacagcatgaaaacccatcatggacatgcaagttgcgccaataccacataaaataacaagcagttgcccagagctcactccatcaacatgcatatattcaaacttatccaatcctttacatatatggaaccccaaaaaatccactatcaacaagatgaaactagtgtcccctccattgcactcacattaaatttatatgagtaaattttatattattttaatttattaatatattattagttattcattattcagtttaaatttaaataaaagtatggtagtaaatatattaataaatttttaaatatattttatatacccacatgtttcagaaaaatgtttttataaggagtattgtcctatgtaaggttctttttcattttagtgatatctcgtatgctcatttttttttattttaaaaagttaatttaattcatttgttttgtgtgatttgcacacttgatttgaaataataaaaattgggtgaaaatgtttagttacaatgtaattcctttttttatttaatttacccttttaatctttaaacttcatctaaaaatgttttaaccatacaaaaaatgttattaataaaacgtcatctaatttcggttggaattaaaggaaaaaaataaattagattacataaataaatatattaagtcatttacctacgtaaattttgttttaatcttattatggttaattaaatctattttaaattaaattagttccaaaaacaacttttttattaaatatttttttgtcaataaatgttataagaaatgaaactttattaaaataaataaataaacatttttttgtcattaaatttcaatcaaatattcacggatggatatactaccaaaaaaaaaaacattcagagtttctctttttccttaacctgctattaatcaagtggttgatgctcatagttatagaggtcttttaatttgtctttactatacaatgtgctcttcctgttacctcatgatcgatcattttccagtgtttcctggtcccatctgcagatctgcttgtccaaaatggcgaactttttcaagactcatatatatcttcggttttgaaatattataggaacgtttaaaagacaattataattagcgtgtcgatttgctaacaaaatctttatacattcataatgtcgttaattacctacatgataatggtaaggttgattttaaggcaattgtcaagaaattaagaactgaaaagttacttacttaaatttgaataaattgaaatacagcaatgacatgaaaaaaaatacaatatactcaaattataatatgataaacattattaatatttataataattactttgagaatttactttataccactgttgttttaaagaccaataaaagaatttccgcacaccaaaaagttatcttgtaattaggataatagggcaagtttggaatgagaaaaatgaaaaagaaatattcaccaattttatttataactaattttattaaggaatttgattttttaatcatatttttttatttataagacttgagtactaaactttatttaaaaggaccaaactcataatcacttaaatcaatgacttgctgattatatattttcttcattaaatatatttacgttgttatatatatatattattttctttcttgtcaaacaatctacaaacctatttttctgtctgagtttaagagacatgtattatatgtgtaaaataattatacaatcaattaattaaaaatcatttttaattacttttaaagaagttattatcaaagtctaaaaaatatttatacagtaatttatggttaataacagtgtgaaaaataatacacatactattttttctttttcttttttttcctttttaaaactaaattaacgtacccttaatattcttaaacacagcgtttgactcatgtgtatacagtccaatattggtattatgaagtttaattggatttgtcctggtcaactaacgacggtgcagatggaggctcttggcacatgaaatgtcatttccttttttggttcggacaaaagaatcagctagcataggcaaaccaacttgaaaaagaaaaatttcaaggacaactaaaggaggtaattaaagatatgaagtaccaaataatatatatgtatggggaaatgatgtaccctttttgcaatattaattaactaccccacattcttccaacccaacccaagtcaatgaatgttttcaattgattttgactgaaaagagagctctccctttatcttttctgaaaggataaggagaacgtccctgtcatatttattttgatatatatatgtaaactaaaagtaatacatgcgtggcgtataaacctccaaatccatagtgaaaaagtaaaatgcttcaagaattttaatggataaatatttgcttgtttgtactgtcgaaaatttcaaacgtcctcccattaagattatgcgagtcctgtacaccagtgagggtgtggtgacatggtgtgaccggttgaaacctgatttttaaaaacctgttaattttacgaaagtgcccccaaactgtattttacatgtttagataccaatttcttataggataaaatacgttttgtttgtatttgtagtctcttatgacttgttttttttaatctttgatattaatttcaagaaaaacaagaaccgattgtaacatgttaattttataagtgtcccaaactacattttacagttgtagataccaattttttatagggtaaaatatgctttgatctttcgttttacctttattttttttagtttttcataattttttcactatttttagttactcataaattgtataaaaaattatcattttacttatgcaaatttaatctatatgttatttgaattaaaattcaaaaatcaaataagtatgaagtttgggagcagaaattgaataatttgcatttcactaggcgaaattgactcaatcttgtacaagcaaaaccatacatcatattgactctttttttttaatgtatttattatatcttgacccctccaagcatgaggtaaacaaaaaaattgagtgtatttatttgaattttattagtttatttaactataaaggtataaacctttgtcaaagaataataactttcacttatttttactttgtatgactgatgtcataattttattttatcgtaaatgtatttatttttatttaatagaactaaacaattaaaaaatatttaaaatatgcaaaaccacaatagataattaaattacatatatagtatttaagttgtacatnnnnnnnnnncttaagatagaaagtgtgtttgaatacaaaatcttaataaaattataaatttatttttgtttcgattgtattttagtggattattttcctctcacaatctcaatttttgggtaattttggaatatccatcaactaagagttaaaaggctaatccttcaccatattgagatccatataaacaatatcttttccaatacaagctctttcattctcatattgaattggaaatcaaatacttgatcacatatttaagagacataattatctattaattgtaacgctccgtatgcatccggttcattaacattgatttatggtcgttaagcgcagcaattatcacatacaatcaaaatggaagcaataaataaaatgacatcatcaaacgtcattaacaacatcaactatacatcatatatggtgaattcttataatatacagtatatataaatcataactgtacatattcatcaatgggtacaaaatcatgggcataaaacaaaagtagaaccaatatgctctccaacactatgcctaaggttctcatataaactattcctgctcaggcttcttgccctgggacctatctttgaatatcacctgcaaaacataatccccaacaggggtgagataataatctcaataaactcagggtccttggaaatttttcctccccctgattcactttcatgcatataatattaaaattgacattataaactagccatcacagctctcaagccatattaccacacacacacacacacatatatatatatatatatatgtctcaagggttcatcattatctttttataaaatatatcatcatcatttaatcatcacactcttaacacattacatgtacatggtatatatatatatatatatatatatatatatatatatatatatatatatatatatatnnnnnnnnnncagtgggaccataacatttgttcatagaattaggaagtttactcatgtgttttaattactatgttttacatgaataacaaattatgatattataattttaatttagtattataccagtcaatcaacttatcatttataactttggattaaaagtatttatgaaagtacttatgtttattttattccgaagacaggaaaaaacacataagagcttgaccctggaagatatcatatgtaaaataatgtcttatttcactcaactaatcccttataattacatcaccactttaatctttcttgcaaatgaatatagctaatgactaatttgatgataaacttttttacttaagattttatcnnnnnnnnnnnnnnnnnnnnnnnnnnataataatgttattatgtataacatttacaatttaatcacaacatttacactatcaataaatttgtatttaatttaacaataaataaagtttgcatttaagttaatattttgtgaaaaaatcttaaacatagtttcatataaattaatttctctaaaatatatgaccttttaaggttttttttttataaatattaagaaatataattaatttactgaattttaaaaagatacattaaataatgtttttaatatttttttatctttttaattaatgatttcatttattttttatgcattacttccataaagtatttattaataataatttaaaaaatatttaatatatcattgattctacaaatgacatatattttgaaataattttgttttttaaaatgtcatgtattttttaaacagagggagtatcttgcaatcactttagagttaatataagaagtatacggctgaactattattctataaccactcaccctatgattcacactactccaatcacgctcatccgttgccaaatcaccgatgattccaagtttccaaatcactttcactctctcctccctctttctgcttctattactactttcaagtcaaatcttctatttcgatctttctcacataatacatttccgtttacaaaaatcttaaattatatttatatttatatttgttacaaatcactagatgtccatattgatgcatccttcttttttttacatgcatcctttgttaagagttaataattatggcattttttaagcaagtgcgttaaacattagttacgcgtcctaatgatgtcatgaaagtgtatttataattaaaaagattactttaaaaaaatgaacgatggtaattttacatgaaatgcaatcattgcatgtaaacaattttacaaatgaattttaaagtaaaatcaaaccatgaaataggatatctctattaaaataatttaatggatttctagtgattaaaagaatttatcctgtcttccctctgatatagtatttttttcctttctgttttttgtttctgggccattcacttttgcatttatctgtttagaaaatacaactattgcattgaggtttatgtacaaatttcgtcataccaatatattagcaaatggagagtgaatggataaggtaattgagattatcttgttttgcacgtcacatccttccacgttagatttcaaagtaattgtatttagccaccacgcaattttttaatcattaattaaaaaactatgactctctcttaactctttttaaactattannnnnnnnnnnnnnnnnnnnnnnnnnnnnnnnnnnnnnnnnnnnnnnnnnnnnnnnnnnnnnnnnnnnnnnnnnnnnnnnnnnnnnnnnnnnnnnnnnnnnnnnnnnnnnnnnnnnnnnnnnnnnnnnnnnnnnnnnnnnnnnnnnnnnnnnnnnnnnnnnnnnnnnnnnnnnnnnnnnnnnnnnnnnnnnnnnnnnnnnnnnnnnnnnnnnnnnnnnnnnnnnnnnnnnnnnnnnnnnnnnnnnnnnnnnnnnnnnnnnnnnnnnnnnnnnnnnnnnnnnnnnnnnnnnnnnnnnnnnnnnnnnnnnnnnnnnnnnnnnnnnnnnnnnnnnnnnnnnnnnnnnnnnnnnnnnnnnnnnnnnnnnnnnnnnnnnnnnnnnnnnnnnnnnnnnnnnnnnnnnnnnnnnnnnnnnnnnnnnnnnnnnnnnnnnnnnnnnnnnnnnnnnnnnnnnnnnnnnnnnnnnnnnnnnnnnnnnnnnnnnnnnnnnnnnnnnnnnnnnnnnnnnntttagagaatgcttgtgaaatgcatggatatttgataatctaattttatactaaatatatatacaattataataatatatgggtaattaattttaaaatcatcatgacgttttacaggaaatattaattatacaccaaaaaaaggaaatattaattaaaattgaactgtttttttaatcagaagtttgaactattctaaaacaaatatttttaatacatagaaataaattacacgagcacaacacacaaatacatgtatttttaggaggaaaagagggtttgagactcttgggtaatgaaaggctcatttatcaaaatacagtcaaacatcaaatgcatgtatttttaatttttctctctgaatttgactcctgcagagctggttaaatgaaatatatgtatatgtatatatacatattacggagtaatattatttattaattaaaatagtaattaagattaagattgtgatattatattattgttttttttaggaaactattatgttattattaaagtattctcttaatttcaatcgacacatgtaatttttttttaaaaaaaattctcacttgagaaaaaaaaaagtaattatgagattaaaaccaagacacgacaccctggatgtagggttgggcacagggatgtattatttttgggttatttaattattttttgttatgagaaggacaattcgacaaagttacagagaaagatagaaattgttattgactattgtattattcctcgctgtctgattaattttggtttccctacacacgtatgcataattcatcctntaattatgagattaaaaccaagacacgacaccctggatgtagggttgggcacagggatgtattatttttgggttatttaattattttttgttatgagaaggacaattcgacaaagttacagagaaagatagaaattgttattgactattgtattactcctcgctgtctgattaattttggtttccctacacacgtatgcataatgcatccttatccacttctacgcttttggcagttacagtaatttacaggaaaacaaaaaaaaaaacaatacataatggaatcttttgtcattaacactaactttaatatatattaataaattataaattgtaatttaattataaattattatgtagatgaatttgttaatttttataataaattatcttaaaaattatattaataatattttttaatgaattaatagggtaacaaatttacgcggacaatacatgaatttgtctttcaacgactaaaataggatttttaaaagaaaatactcctataagcttcatttatttgtataataagtttagtgtttcaaaatttatacttcctaggaagagaatctgtcccaaccactctgttggttgtaaaaaatgtgaattcgtttgttctacaaattttttaagtattagagtttatttttgaaataaaataactcgaactatgggtcttaatctccttataattgcacttgataattaaaaccttgtttcagcttaaattgaacctcttcatattttttaactcaagcaatgcacacgataattgctaacaacatatgggatgaatatcaatccgaatcaatagatgaagatcgaatgatagacctgttactgatatctgaaattgtatcgttctcaagtgcattaatgcaataaatccaacttagtccgtttcagctcatacatttgcatatataatacactcaaacgaaaaacgacgaccacacaacaacgcttgtactctaatacataggacagggacacaccactttttgacggactcccaagtggtgtaaaagccacattttcagtacttaattaaccgcaagcctgcaatgaaaacaacactaataattttaatattctaatcctctagacacgcctgtggagtgtcagtagtttgggtaagcttgtagggttttattactgcaaaatacttattgattttatcccgaagttgaatgacctatctttggtataatattttttcatcaataaaatccaaacttgacatcttacttaagatatctggattcattttcattcaaactaatgtcaacttttatatatttgaaaacaaaatacatataaaaaaagtgtttgagaaagaaacttgtctaatgagtcataagtataagtttactattttttacttttaaagaaggaactagattgttgttgagtcttcatatataattttgaagtcatgaattaaaaatttataatataagagtcaaaaatatttgacaagactaattaggttgttaaataatcatgtgtgcagttatgcatgcagannnnnnnnnnnnnnnnnnnnnnnnnnnnnnnnnnnnnnnnnnnnnnnnnnnnnnnnnnnnnnnnnnnnnnnnnnnnnnnnnnnnnnnnnnnnnnnnnnnnnnnnnnnnnnnnnnnnntgattacagaataaccatactcatgaatgcctttcttttagactatagataaatataaaattaacaagaaataaataaatgacaaaaaaacaagaggaaaacaaagattaatgattctatattgagtttaaaactacttacacatgacaccatctatgtagtcttcttcacttgttatgagtgtttattactcataacttgttacatacttgtaattttattatcaaagacgtgtatatatgaaaaactatgttataaataaatatatttacaaataaatacttatccatctatcaaagcttttgattttttttatgtgctgttgatgtcaaatggagcaaaacaatgtgataacattttataattggttatcataaatataaaataaaataatgaatgtaataaaaaatatattatataaatagtagtataattcatgatattacatttatatcataaatatatatatatatatatatatatatatatattagaaggtgacgtttaatgttagtaataataaataagatgaaaaactgaaaatatctgaatgcacacagcacagatggcattatccgtgtgctccaaccagttggaggtgattgagtactactggagtatgatgacctatctaacggcttctttctatctctataaatgcttcttcaagcgccacttcatctttcacacacactctcattactcatagtgatggataataatacgatctccaactttatcgagttcaacgagttgatacccaggttaccgagcgaactcggactcgagtgcctcactcgtttgccccactcagcgcaccgagtcgccctccgagtctgcagccagtggcactgcctcctccagagcgatgcgttttactcccacaggaagaaaaccggccacacccgaaaagtcacgtgcctcgttcaggcgcgtgaggagcaactgcttcaggaaaaaaacaagtcggtttacgggataagcgtgttcgacccggagagcatgtcgtgggaccgggtcgacccggttccggattacccgtccgggctgccgctgttctgccagctggcgagctgcgacgggaagcttgtgctgatgggagggtgggacccagcaagttacgagcctctgacggcagtgtttgtttacgattttcgcacgagcgagtggcggcgggggaaggacatgccggagaagcggtctttttatgccatcggggcggggttgggtcaggtttatgtcgcgggtgggcatgatgagaataagaacgcgctgagtacggcgtgggcttatgacccgaggagtgatgaatgggccgggctgaacccgatgggccgagagagggacgagtgcgagggggtggtgattggggatgagttttgggttgtgagtggttattccacggagaggcaagggatgttcgatgggtcggcggaggtgttggatatcgggtcgggtcagtggagggaggtaaacggtgtttgggaagagggtcggtgtcctaggtcatgtgttggggttgggaaagatgggagattggtgaattggagaggttcggatccggggctcagggttggggtatgtggggttgcggttgggtccagggttatgttgagtggatccgattacgaaggtgcaccgcatgggttctatttggtggacatggaggaagggcagaaccgtaaattgagaaagataaatgtgcctgagggtttctctgggtttgtccaatcggggtgttgcgttgaaatatagtgagtgatgtacaagacaagactcgccacttgtgaagatgctactacccttccagaattggaaaagccaaatttgttactagttttgttttcttttgctaaaatggagggggcaaaggcaaagtttgatttgtgcatttgaatttaccatacaaatgtaaatgttactgtatagtatattgttttgctgatccaaggaaggagtgttgaaaattagaacattgagattatccataataataatatttggggccactaagattggaccactatatatagtcttataaatggaccacataataatgaccggttgatgggaatccaatgcgatggtgagtgtaaaagattgcttccctagcgagtatagtattttagagatttgacgaaaatgtgacagttagggatattttttaggttttttaatgatgtgtatgtgtagtggcggttaaaaaatataaaacaaatcaagagtagtcctcgtccttccctcatcctcaccgcctcaatctacccaaaccaaccgcgtcgagatccagcagtagctccaccacgtcgggcctgacgtgcctcgccgccagggcgcggttgatgtctaaggcttgtttaggttcttctccgcgctgaaagacgaggttgtttgcggcctgttcactgacacagtcacgcgaggagcgcatcgcccatgtcctcgttgctccgtcgccgcaggaagcaccccgcgccgctgccggagctcttcattgcaagatggggaagcctcaggcttgagtattaaatacttaatataaagtatcagattaaattaaattgagtattaagccttttgaggacctcaaacttgagctcgttcgtcactttcctgcacaacccttcccgaagtcaatcagtcttctgatgccaatggcatggctaaatttggattgtattccctttgtcctctttgtgcttttttatttttcaccttgtttatttttttttttttgccttttgtttggctcggtttctttctctagaagttcttgagttgagtttaagccatttaactcataatatataggactagataatttcagttacagttgggttgaagacatgactccttgtaattacaaatttactttgttctacgatgaccttgatttacataactaggtggtctaataacgaaatgccttgattctgggcccaagaatcacccttgatttgcctataaaataaaataaaaaaaaaagaatcacccttggcgagctattcacaggatgaaagcagatgaaagtgttactgttcttatccttgtttggaataataaaactcttgttgtagacctgaagaaagacgggttgatggcaagccatacttaggaaactgcttattgttttggaaatacagtgacgaatgtcagatcctctgtaaaaccatcactcacataggccaacacatcgtaatattgaaatacctcaattttatcccttttaaatagaggtaatattgtcctatgccttctaaattcatataatatttatgtaaaataatcaccttaagatagaaagtgtgtttgaatacaaaatcttaataaaattataaatttatttttgtttcgattgtattttagtggattattttcctctcacaatctcaatttttgggtaattttggaatatccatcaactaagagttaaaaggctaatccttcaccatattgagatccatataaacaatatcttttccaatacaagctctttcattctcatattgaattggaaatcaaatacttgatcacatatttaagagacataattatctattaattgtaacgctccgtatgcatccggttcattaacattgatttatggtcgttaagcgcagcaattatcacatacaatcaaaatggaagcaataaataaaatgacatcatcaaacgtcattaacaacatcaactatacatcatatatggtgaattcttataatatacagtatatataaatcataactgtacatattcatcaatgggtacaaaatcatgggcataaaacaaaagtagaaccaatatgctctccaacactatgcctaaggttctcatataaactattcctgctcaggcttcttgccctgggacctatctttgaatatcacctgcaaaacataatccccaacaggggtgagataataatctcaataaactcagggtccttggaaatttttcctccccctgattcactttcatgcatataatattaaaattgacattataaactagccatcacagctctcaagccatattaccacacacacacacacacatatatatatatatatatatgtctcaagggttcatcattatctttttataaaatatatcatcatcatttaatcatcacactcttaacacattacatgtacatggtatatatatatatatatatatatatatatatatatatatatatatatatatatatannnnnnnnnntttagagaatgcttgtgaaatgcatggatatttgataatctaattttatactaaatatatatacaattataataatatatgggtaattaattttaaaatcatcatgacgttttacaggaaatattaattatacaccaaaaaaaggaaatattaattaaaattgaactgtttttttaatcagaagtttgaactattctaaaacaaatatttttaatacatagaaataaattacacgagcacaacacacaaatacatgtatttttaggaggaannnnnnnnnncttgcaaatgaatatagctaatgactaatttgatgataaacttttttacttaagattttatccattaaatatattgaaatgcttctgaaataattatacatttttttatagttttaaatattcagattctacgtgaaataattatacacaaatcatttataattgtaggtattttctttcaatttatcttttaaaattcatttaaatttagagaatgcttgtgaaatgcatggatatttgataatctaattttatactaaatatatatannnnnnnnnnnnnnnnnnnnnnnnnnnnnnnnnnnnnnnnnnnnnnnnnnnnnnnnnnnnnnnnnnnnnnnnnnnnnnnnnnnnnnnnnnnnnnnnnnnnnnnnnnnnnnnnnnnnnnnnnnnnnnnnnnnnnnnnnnnnnnnnnnnnnnnnnnnnnnnnnnnnnnnnnnnnnnnnnnnnnnnnnnnatatatatatatatatatatatatatatatatatatatatatatatatatatatatatcatctatatgggcacatttatcatcaggacttattcaaacatatatttattcgattcaattatattctactggccagaataaatctcattaatcaacacacatagtctcaatccatgtatatcaagtacatgatttcaatcaaaatagtaacacacaatttcaatatacatgcatcaattcatacaataatcatcactccctttggagtatggtggaacacaaacaagggaaacactcccaagaacaaaaagcttacctgctctcagcgctacaccggctctcccgaattcatggtcacaaccaccagtaatatcaatatcacaccctacacaaagcatacaaacaatcaatcaataacggttctcaaccgttagaatgaaaagaaacactattcatttccattacaacctctatgttctctatcttaggattatcagagctaaccaccttataagcgattcacagaccctcaacaggatctatctggacctaaccaagatcttagagtctccctagactctacataaactagttcaaagcattcagttgcttaaccactctatacctcaagaataaccaagtcattcaaaacaatcaatcgaacgcttaattaccttctatagggtctcctgaacacttttagtaaaagcacatatgctcattcatatcatgatacccgccatttaactaacattcttcctactcatacatatctcagagtcaaaaccaaacttcatcaatagtcatgattcaaagctcaatattcctcagaacaacctcctgagcatatttttctaaagaatccacgactaattccagccctaacacaattgggttactattcatcccaagaaccatttcacaaatcaatcggtaaaacttgagtttcttacctctaaacagtcgaggaaggctggagaatcacttctccaagctttagcgtccttgaatcgctttctttcccttccaaaactcagttttacaaagtcccctagagaacgggatctctccgattgatggttctctcgaagaattgaagctggaacctagctcatgaaggaattctaatcaactttctagttggataggaagtgtttagatgaggtatggaggagatatgaagcttttctaagttgtcaatggtagaaaagcaaaggaagaagaagaggaacatttttcctctcccaaaatgagaaaatagccttttataggccccagtccgcgttcccacgctaatggcgccacaccccatgctaatagcgccaagaattcgaaagaaagagcttcctaaagcattttggtgctaatcgcatcatctctggcgctaatcgtaccagatattcgaatcagggggtctccagggccattctggcactaacagcgccataactggatctaatcgcgccacatgatcgagtcatgatgctaacaatgccgctcctgacgctaatcgcgccaaataaaatattaatatatttttcttcgtcatggttattatattaatcatgccataatttcattttgatataatttttttttactttttttatctctctatttattcaaataatataagaaaaatatatataatttctattttcttttttcttaattttagaaagtagataaattaatgcatcaatcctaaaaatcaaacaaggtagtataaaaaggaagtttttatgaatatatttgtacaacatcatttaagggatgtatttaagtaagattttaaaagtaccctaaaaaaagttttaaaagactttttttgtaaaaaataataatataatattcaattaacattatttaatttttttaagaagtgtgatgaaatccaatgatattcaattaaattgaagtctaagaaatggactattataaataataaactagatttaggccttaaattattattttattaaaataatttatgtttattcaagcaatacgtcttatttaacttaacctatttttgcatctattaatatgtcaaatttaaaatttaaaaattaattttaagtgatactatttaaaagaaataaaaaataaattaatgtaaaaaaaactacctaatttaacttaaaaacacttatattcaagagtagccatgaaccattcaaattcatattataaaatggatataaaaattcatattataaacacgaacaggcatgaattgatttaaataatttttcattttaaaaaataataactcaaatttaaatcaataattcttcatatttacatatcaaactaaatattaaatattttttccatggaaaaataaaaaataaaataaaagttgtgtgtatggaacaaaatttgagcaccaattaaaggaaggtgaatttgatgttaaaggatcatttggtggtctcagtgagagaatagatgttttacaaccaactacaagtttcatgttggatacaatactcatatcggcgattatggtcaagaattattttatcaagtgccatttacattagagatatcgcttgacacttttttttaaagtacaataagaaatagcaattctattttgaaaattttcatcataatgtaaatataaaagactaataccaaattggtaaaaaaaattaggagaagcgaaaaaatgcaagatcatttgtctttttggctagtcaaacatcgactaattcatatatcattgggtttcgattaccaaggaatcaagactttacaaataaagtccaaggattgacattccattgctatcattttatatatacagttacaattatctacgttcccagtgtgcctatgatgtagcaccatgaggactattagctagtgtatattgccttatgagactagagtatggtacatataaacttgaagaggtctgcgcctcaacgcatttcggggagaaccaactagatctaggtttgagtggcatttcacccctaaccacaactcattcactgattcttcaacatcagtcaattcgagcctccacttagtttcacccaagcttcatcctggtcatggatagattacccaggtttgggtccataagcagtaataattgcccctggaagactcattttcgctacaactccgatggtttcccttaaccaagccattgcctatgagtcgtcgattcattcttcaacaagcaagcagttagagtcccgagcctctgccaaaattctgctaaggtccaattctaatacgataggataagatatacaagtaggataagaacaatatataataagaacgtgataaactttaattgtattgaatgtttggtgcatactagataacgaagaagggtgttcacgggtatgagtcactcgagaacccgaatcgatccgaactaatctgaataatttgggttgggtcatttatgtatttgggtcaaaatcgaactgaaccgatcaaaattgtttatgtatgagttgagtcacgggtttagatttatacattcgttggcctattgacccgatccgttaattcgtaataaaaaaataaattttattatatatatattaaaattttaaaactaaaaaaatattttgacaataaaaaaaggtgtgttgggccgaatgaagggtcagtccataatcatctcaactcatctttgctgtgaaggtgtgatacaataaatgtcacaggtttaggtttctttttcttttgcacttctgtgttctctcgcatgtcatctcattctttgcggttatgcaccaactccttctcagttctctcatcttatctcattagatcgatcaagcatcacgttttcctttgcgctttcttttttctttttcgaagctctttaacttctcgtgattattttggtttgtattcattgagatttagatggaaacaaggatgggaagaaaagaaataaccttcattgtcgagtgttgactcgaatttttgttgttgtatttgatttaccattttctttttcttgtttgctttagaattaagctaatctttgataaaatcttataagaggaaaatgtgcctgtttggattaaagattgagagaattagtttcagaatgagtaatagtcaggacctgatttttttttctttcgttggttgatttattctttgagagtttgatttaaatgatgtctttttatttttcttttgttcttttaacattctttgaaagtttgattcgaatgctgtctttttttttcttcttcttttgttcttttaacattaaggttacttaaaaatcagtgttcaacgatgccaaaataatgatattacgttttttgttaatgattgaaatgatgtcatttcatcataaaagcaaaaatattatatttgtataaaatatcaattaagttttgggctaacggggttgtatttaaatttttagagtcgtttgtttaactttcaatactattaatattagatctccaagtgttgaaattgcaagtgttgaaatttcttaatgtattactttcaggtatattgttatttgtttcaccctttttttcatattaatttgtgagaaatagttgtgattcagactattatagtaaatattgttcaagaatcttttgttttaatttatattataagtctattttagaacattatgttcatagtattaaataaatcaattttactactttcatacatttgataatattatgttaattatattgaatattcgaaagaatcatgatataaaatagtagttctaagaaaaatatattaaatgggtaatctgttggccctaaccgaaccgttcatgaacgggttgagttgggttttaattttttttaaaaactgaactaaaccgatcaaatttgattgagttgaatcataattttggtcaaaatcgattcaaaccaatccgccaacaccaacaaaaggacatggttaaattttaaaaatattgtttcattaaaattacctataatttataaattttttttataaactatgattaaaaaaaactgaactataaaaatttaaattttatttatgtagttatttttttacaattatataacggttttaaagtagtcaaatattttactttgaaaatatttgaataataattatttaattttattattttaattgataatttaatttaaatttatgttttaaaattataatatatatatatagagaggaaagagagaacataactcctattctatcttgtcgatcataattttaatcaaaataagaaatatattaaaataaaaataatagaatatgataagcaataagataatactatcatattatatttatgtaacaaaatcgtattataataagatatggtaactatcatatcgtattccctcttattttggccaccaaatagactcgaagggaacgcctaataggagataggtttttgtttatgaggaatcatatgttgggaaacttatccatgtttgatatgcatttttaaataacattcctagaaaagtatgttttccataatgtttttttagtaaatttgtcatgaaaacttttttattggaatgtgaaaatcttatttatttttttagtttaatatttttattacagtcaaaacatgacataattctttgccaaattatataatgtggtgaatcattaaaataaaaaaatatgcataagtatttaatgtcataagtatttaatgtcaaaaatttcaatgatgaatcaaataaattttatttatttccagaaatcatgattcatatatatgaaaaaaatttctcccctacacatgctccctaagagtatttgacaacatataaaattaaagatttaaatatatttttgattcataataaatatttattttttgtgttcacttgttattaattttattttttatatggaattccttataaaataaaaattttattttttattcttgacattattttttagttcatgataaattaatgaattttgtattcatttttaataaattttttaatttataattagtcaaactaaaacaaaattagttaaaatttaaaaactaactatacattaaggtttaagcaaattctaaaggaaggtgaggcttgtttggttttgggtttgggtttgcgaatgaacgagtgagtgcgtgctgtatagaatccgagatttgattagtcagggaaattaaaacagaacagaaaccctccgaaaacgcaaaaccctgttggcgtcgtggccatggatttccaagtcgtcgttctcggcggtggcgtctccaagaagctcatccctctcgtttcgcaggttccgaacgcgaatgcttcaaaccaaacaaatttcgatgctattctattattctaaagcgcttatttctgttcgcaggagcttccgaacgcgttgcttccggtggcgaatcgccccgttctctcctacgttctcgagtacttggagcttagcaacctcaaagatctcattttggtattttcatttcttgcaatattttagatgttattgaagagggtaaatagtgaattagtaatgatttttttaactgtaggtggttgaaggcgaagaagcggctcttcatgttggggcttggatttcgggggcttatgctgatcgcctccacgttgaggtaatcactttttggatattagaaaatttaccaaacatgattcattgcctctatatatgtctcagtagtgaccacaaacataaggatattatgtaggttttataagttatagtaggaaaaaaaaaatagaatgaattcgcctgtgtggataaacttttcaacaagcacttttagagaagaaaataagaaggtaaagtgaattatgtttctcccgtaagttaaaattagcttatgcataaattaaaataaacttttaaagaagcaagatgggagagcttctataaattagcttatgcataagcagattttaactcatgcaaacagggtcttatttttaaatttttttatcggcaaatgttaatattgttagtttgttagtttttttttagcaggagggaccgaacccaccacctttctctccttcccttctttcttaatcatccaaccaaccttatatcttccttaagggtcttatatagtttgtacttaaaagtattgatactatgtccaaaggtgatgatttgtgcttaaattttttccaggtagctgcagttcctgaggatgtggggacagtgggtgctattcgggccatttcacatcacctaactgctaaagacattttggtggaatatcctcccctcccctgcccctgaactctgattaaaataatgttgttctttatggttgtattgattttctgcaggttgtcagtggtgatcttgttaccgatgtgccacttggtgctgttgcagctactcatagacggcatgatgcagttgtcactgctatgctttgctctgctcctgtaagtggacctttggagtcagtatcctctggtgggaaagacaaaaccaagaaacctggccgctatgatttgatagggctggatcccacaaaacagtttttagttcacatagcaactggttagttatctagctttcccttgtatatgtcattttgttgttgtatgtatgctcatgtggaatcttgcaactcttttcaggtgcagaagttgaaaaagatcttcgaatccagaagatcatgctccctgcagttggccaggtactttttctttcttgtctctgaaccttcctagtttgttcctcctgcttataatttctctaatgttatgagtttatcactcttctagtgtgagatataagtgtctattctataccaactttagtattggaggtattttctgtttgttacttgtgtagagatggaaattggttattgtgcttttagagtaagaaaattgttcaatctgtcaatcttaaagaaatagcattttctgtgaaaatatgaattcttcatctgagtaatagaaaattaaatgcaagacttctgcaatttcttatttctctttgtttctctttattgttatttgtccttcatgtagatagaaataagagctgatctaatggacgcccacttgtatgcattcaaaaggtacattcacttactttttaactttctcctttatttgcagtcttggattactcatgttgtatcctgaaacaaacttttcttgcagatcagttctacaagaagttctagatcagaagagtgcatttcatagcttaaagcatgatgtattgccatatctagtccggagccaactggttagttgttaaaggtttttgcagagataggctaggtaatgttgtacttttaaggattctaaccttattcatattttctaaatgagagttagaaatcagaagtattattaaatggtatgccacaaacagaagaaaacggaactgaaaaggttatttctcaaagcaatcaacaaatgctatctcaaatactcgctaatgcatctgaaccaacctttcatctgcgacatgcactgggtccttatgggtctacttttgatcgaagaacccacaaatgttgtgtatatattgctggaagcagcaaatactgtgctcgcttaaattctatacaagcatacagtgacattaaccgtgatgtgagttagttattgttatgatctttatcaggcacttgctattgccttacattttttctttgggtatagttccggttgcttgggcgttattcattttttactgtgacaggtgataggagaggctagtcacttatcagggtattccttctctactcaaaacaacattatccatccttctgcagagcttggggcaaaaacaactgtgagttagttacctaagttgtgtgctctggtacagtttctggagcaatatttttggtcctcccattttaagatttatataaatagttgcaatttgtttttaggttggaccacattgtatactgggggaaggttcacagatgggtgacaaatgcagtgtgaaacggtctgtcattggccgtcattgtcggattggtgccaatgttaaggtggggtgatattattcttacaagttaacaagttactttctggtcttatgatttgtctgtgacacttatgatctccaaccctcgatgattggtcagcaacactgattggcatcttactaatgagttgtattcaataatgttaatgccaagctttttcttgacttgcttttatggatgcaggttgttaattcagtagttatgaatcatgttactatcggagaatcttgttcaatccaaggttctgttatctgcagcaatgtacagctccaagaacgtgctgtactaaaagattgccaagtaatttgtttcacctctctctggcaatttttcatgatcgcaatttgaattggaatgtgatattgcctgtcttggcaggttggagcaggttttgtggtcactgctggtagtgagtgcaagggggaggtcttggcaaagaaatgaaactagaatgtgaaaatcgaggctggggaaatacatagcaaaatgacttctattctgcttgatcattgcttggagcaaattttgtgctttttgctgttagcatttacaatttggtgatcttagcaggaggagcaaagaaattttaatacttccaatttgtatgcatgtcctttgcagtttcttgcaatttgtttgaaaatggctgcaatcggtgttgaatattcatttgtgtaaatgactactaattgcttcctctgcatcactattttctgccatccaaatgcatgttgcaagggactttaggttggtatcttgctgctgtactaaagctgtataatccagcgccatcagttttgtattcgagcaaatgtagtactattgatgcgttttggctttttcagttttgtacttttgtttttgtttgagatatagtgataataatgcttacttgaatttgatgcttgctttgtaagtaattcgtttaagctcacttttttcctccctttttttgcgagagagaggggtggttctcaaagcttggtagcgtcaaccagcagatcatctgatgggattgggatgaggtgtgaatgttacagaattactaaatggtctctagagaattgcgagtgtctttgatgccatttacacatttttgttggtaaaagttgccatatgcattttggttttgcctatgtatatcttttgttcaagagtaccttataatacctgttttagattgctttcactacaaactggcgtttagcaaaagggacaaaatgtgttgatagattatgaaaaataaattataatcaattccatgaaatagtttttatgtttgaaaatatttggtaaaaagggatatttaaataaaagacatttcctatagtaaaattatattaaaaagatatttttttaaaaacatccaattgtctagataaaaaaaaaaacttaataacttataataataagttttaattatgagtaattctttttataaaaaaaattgaagattacaatctgaatatcttctaaaatgttaatcacataaatagtagttacgtacttgaaccgttttttccgtgcaaaaggcatttattcccttgaaaagaaatcagcattgccaaatacacttatttttttactttaattgtgcacggagtctttattttataggtttcgtgaacgtaagggttaattaacaattcttttaaaaatatattacactagtttagaatgtgagaatttcttacacaagacacgttcatctttacttggttacatcataaatagacattagtagccaatgtttattcaggaaaaacagttaaattaatttatgaaatctatatcattgatcattattctttgaatgataaaagaaatgcttaaagtccttgaatatttttttttttggtcaaaattaatccctacgtctataatttgtagattggggtataaaaatttagaaaagaaaagtcttttctatgattgggattgacaattaaaatcactaccaattcaaattgagggaccgtgcgccgatacgaaacccgcatatgaaaaaggaagagtacgaaaatccaacatctttccgtagctgtgtttgactccctaccttgggctgtgttttttctatgctggactatcagatttgctctcttactttgtactctttgttggcattcttggttgtggttatctttggcattgttttggcaattctatgattcttttcaatgctggcatatcattggggaaagacaataggtcctaccatgtgatgcagcattgtgcatttaatctcgaaactaagggtgtgccttaatttccatttaaaaaaaaaaaaaactgtttttagctttcaaaatgcaactaaacaaagttgctcacataattgatggaggatagtgcaagcacactgcaaactgctaagtgtggatttgacagaagttgctttcaaaattggagggtagtgcaagcacacagcaaagtgtggaatcgagagagaagttaaagaaaatgaaaattgacgaagacaggaaaacatttctcagctatttctatttttttgggttttaaaacaattgttttgaaaacaaatttcaaaacttaataattttaaataagaaaacggttattgagtaatgagcagtgcaaagttgttttagaagagaatcaaatattgtgtataaaaaaaaagaagagaatcaaatatgtccatgcccttaagtttctagttttcctgaatgcatttaatataaatttaattactattttatttctctaatttattttttagatttaatttgttcatcttattatttaaagatttaattaagtctttaatttttaaaaatgatttgatttagttcctttacttttaaaatattcaattagatcctttattttttaaaattaattcagtttggtcttattttctcttttatttgctaagaaagttttgaaaaacacaattgaatttggtttatattgggaccaaattgaaccaatcttaaaaaataagagacctgaaatttttaaaaataaaaagatctaattaaattatttttaaaattataggacctaattgaatcttttaataacaagagaactaaattaaacttaaaaattaaattaaaggatcaaaattataatgaaacgtttaatatactaaaaaaaaaaattcaacacatttacctaaatactggccaaatcgtccctcgatattgttagtagatagtcaaaatatccaaatcaatcctctctctagttttaaaaattatactattgttaattactttagttttttttaatttttaaaatctttttaattcttaacttcaaaaaatatatattcattttagaatgaataatatatgtattgatagtgtaaaggattttactttatcattcaattacaaataatcataatataaatttgttaatttttataaaaatcataccaatctgattaattaataattaataatgcaaacttctttacacagattgtacataaaaattaaactctgcattttattcctttttactttatattccattattttacattaaaagaagaccaaaatcaatgacaataaacaatgttacgactttataaagtgaaggatttcccactaataatatcaaatgttcaccatttgattgcaaagacctcacccggtataaattgtattctagacatagggaatggactgaattaataatgttactaaagtctgctctgaattgatagctcacgcttcatttgatctctcaaaactctccttagtaatttgttggaagctgttcggggaaagtcgggcacaattttaacaaggctcacctgtaaagtaacaaaatgagttgtgaacatcaaatcagtaacttcatcataagtcaggttaaaatttgcataaaatttcaatttcctttcaaactaagactttcatgaatctttaaataattaagttattgcttttcgtgatgtattcaattcaaaaccgtagttgcttaatttctacaggagaaacactgattgcagctgtctccaaaatgccttcgtcggccccatcacagacacgctcaatttctacagaacttgtctgcataacagaacagaaaattccaagtaagaataacggtcagaccacggatatcaagataggaatttatgaatttctgatgaatccatgatcagttacaagtacggaagtaccttccattcttattaatttattcaggacattgacatggaaatatttaggattcttacaccatgttttatctagcagaatagctttcagaagcttcatctccaatcagagtagaactgggagaaggagctataataaacataaatatagcggatgatacctttattccgccaagattcattgtgtcctcagcccgcccttgtacaatgaaatggcctccagcagttcttttgattatatctccatgtctcctaagaacctgcttatatcatgttagacaggataaattatggataaataaaccagttgaaaaagtagatgacaataacaatagaacgagagtagttaatatttcagcaacaaccaaaaaaaagagtagttaacattacaaatttacaaggcaatctaataataagttatgtaatttacaagggactatctgaaaatccttgatggaagatctgactaatccacacttctaagaaacatttagatattgatcactgacataggcaatagcattatttgacaaacatccaaagttgagagttaaacagtaatcctatcctctctaatttctttctttatttaactgaatgtgaaaatcatacctttcctttgtaaatgggcattcccttaaagaaaacctcctcattatccgcattaagcaatctatcagtcgctcccatatatattggaaacaagcccacttcaccaacacaagcaacatcctctggctgtcgcattggtcaaagagatcaaacaaattagatagcttaaaaaataagttgtctataccacaaaaattgctattatatatcacaatgaacatttattgaagatagtttggtcatctactagaggaaatgcaacccacttgggaagagtaaaaaatcataagagaattgaagagtgtaagttataggagaaaattggtggccaaagggttagtataagaattacaccattcagaaacaaatagtgaaggagaatccatatggacattctaactgatgaccattagaagtcagtcttgactcttgagattttgagactagcatttccaattagccattattggttctgagtccggattatgtaatacacttgacatccattatccattgcagcaacaaaattatatgtgggtattggcatgatggaaagcagtgtcaattcggtggcaacatatatagtatcacatgatcaaataatagaaactatcaagaaaacattcttacataaggaactccattttcgtcaaggatgaccaaaccagttgccattgatgccgtgctaaatgctccaaaagcttgaggctgcagtggacttcccatgatgtaagaagatgcaagctcagtgcctccacaacattcaatgattggtttgtaataagattttgaagaaagacagaggtcatcatcaacatttgaagtttctcctgttgaacaaaatgttctgtgcatataaccacagtttagtgcagtttttcacattagttacctgattattcaaacttaaaagaaattactttatttttgtccaatccaagcctccatgcattgtgtacccttccaagtttttactaagctcggaactgttcccaaaatagtaacaccagcatcctgaacaattgtagttgaatgatgttgctttgtgcaatgtatcaaattctattgatgcagaatacaatataatctacaacaaataatgacgctttttttaatttttatcttgtttcatttatgttggacttttgcccccttccagaccttatttaacctctttgtagctaagtcaagttctagcaatgagtgtctagctttctaaaagttttttacccctttcctttacatttttaagaataaaactcattcagattgcatgtataattcatccaggcctatagtgcaagggttaaaattcaactagaagcaccttgtccttgagggtctgcatagggacacctcattttcttttttaccataaaataattgcaaaagttgatgtaaatgcttctatgaacatagctcaatgagacaatatattttttctgtcatcacaaacttcatcttattaatgctattttatgtgacaaagcattttcgaaagaatgagaaaagttttttgaccttgttatgacatcagtgtggcacacagttgcaaattattttcgcaaaagatatgaaagttcttgggttatctcactatagataacactaccttacaaccattaccttctacatcccactgtatcatattacttcattgcttccatgattttgcagaaaaaacaactagtctagttcccactcagttctgctactagtcagcacttactttgtttgatttccaaattcttaggttattaaaataataatgaccattttgtagaataagacatgttatgttaattataaatactataaggactgaaatataagagttggacaaatacctgaacgaactttccaaaaccatggcctagaggagatccatgatacaaagcaagagttgcacccgatagagagcatgaatatataagagttgggcccatcacccatcctaaatttttaggccagcaatagacatctccaggttgaatatcaatgaaagcccatgcatctgcagcacttcgtatcggtgaaagttgagtccaaggaattgcttttggctcccctgaaaagtaaaaacgtaaccagaaaatcattacaatgttagtttctgcttgatgtgtttaagggagaatgtttacctgtcgttccagatgagaaaagtatgttagtgacagaatcaattgattgatagattggagagtagtgatgtgacctgtcacgattaaaatgttatggtgagacaatactcaagagaaacaaagcaacttctctgtctcttttttctgtttttggggtcttttgcaaagactattttagttcacataattacaatttattaggatgaatatatatggcttaatagacacattttgaagtacattacctgggatgctgtctgctagaagaaagataaaccttccatgatatatcgcattctcttaattgcacacctagatcatcacctatcacaggcagagcgataactttacatgcagctgcttcaatgactcgactacaaggagaaataagcagaatgaggtcagtggtcaagaaattttgcatggtaaaatattctgaaagtggcattcaagtaagcattagttaggaaattaggatctagatacaaagtttggccaatgagaggcagtaatgcattcgttctaagataagttctttgtaacatcagttgagagttgaccaaacaggtctggatactcattcccggtcagattgccagttcaatctggtcttgacaactaagcttgttagaatcctgagttagaatgtaaataggaaatacacaaaaaataccaagagtggctgagagtaggatatcatttttataagtgaaaaatataatttgtcactaaaataattcctttgtgatcccattaaatatctattaactaaagtcacgcctcgtgcctataacaaacgccataaaacaaagtgaggcagaaatgagaaaaagaaaacagggttctatagaaagcaggttccaaaaatacaatgtgtttgatgattttctgttccataatagattatgagttttcccaaaatagcccaaccacgtatatctatgctcaaacgcaaagacttctcaccagcatgtggaacatagcatcgaatttgaacccaagcagcaataagacaaacataatattgaaacatttatcaaaggatactttaacagatgatcattaaataacaatagcaaatattaagttggcaattgtgccaaaagttaaggataatgacaaataaacttataaagcttaagatgccaattatgatcttttgaacagataaactagacagtatgattttcatattgcaacaaatataaatataatgttaaatttttttacctgtacaaagggaatttcctgccacctcttgatatgaaatcccaaaacaaatttaagctgagtaaaatacaacaattctaatttgatactttggaagttcatcatgtaagtgcttatatcaaagacctaaatgtgagggcagcaaagatcaaactctttaccactggatcaggagacttttataccatgccaaggaccaactctcctaaaagcttaggctctatgtttttatatctaaagaaaattcaaagggaacatctacatcttattttgcaagaaacgttttttctctctccctccttaaagaggagtactatatgtatgatacttactagaatttggacttgagcctaactcaacccccaaaagctaactcatattttaatcatattactagtcaatgtggaatattcaacacactccctttatgctgaaggctaaacatctcgaatgtgatgtttgcaagattggataggagaatttggagttggagcttaacatcattaagatttcagtcacttgatttcctaatttatttttgcttaactctacctaaaaggctaaaactcttggcaccatgaaatctattttcaccagtactgttttgagcactaaaactgctatcacacatgacatacaataagctttcaatgcagctacttttctacctaattagtacttattaaaaacctgatctttctcaagcttatgaagtcttaattgcattattgcaatgcacatcattcacaaagactaatcagccagaacaagatccaacttttgttaatactgaggatcaaagctatatgatgttgtcagtaccctcatcaaacaggtataagcctaagttaactaaaataaggtccaaggaatcagtattttaacaaattctccaaagtcagatatctttgcacggactattggttgaatctcatcaaacgggaaacacaagttagacatttagactcgaatgaagattaaaaaattttaagccactaacaatttggtaattttgttattccttcacacacactgagtagcattacgcacaaattggtaacggagaaagaacaaagtcaaagacaacatcaaagattgaatagactcactttgatcaacaacagctttacttttaaagtcatacgcataataccaaatttaaaagataacctgagtgaaaataccctttgctttagaaacatgcagacgagttgcaatttcttttggtgcaaagctatcagctattgatacgacaacacatcctgctagaacaatggctaaatatataatcacagcattgactgtcaattgcatgtaaatagcgattgcatctcctttcgagaatgtggcatctattgcatttgctaccaacctgaaacgatataatttcacacaggaagcaaataaagagattatagatagaaattacttctagagtaaaacataacgcagaaagatcaaaaaccaaaaagtgagatacaagcacgaaaagaattgaaacaaaagtaaaatagcagaatgatacacaaattaatcccgattaatttgaaaaaacacacatcaaattattgaattaaccgacttagcacaagttactagtatgatgatgagtaacataacttaggtggaaaagttgaatggcttacatcaattagtgccggagttgtttaagcgtgatatgattaacctcggaatcatcaaaaccttcatctctccaaacaatggctaaagtgtcatctgttttgtgggggtgtgaactgggttgcaaacagcaattggcaatgttgaggacagaaccggggagccaagtcccaccatgtttagaagggtcgaaagtatccaaaatgcacttgggaggttcaacaaaggaaactgaaagttccttgagaataagggaccagtaaagctgcacaaacaaatgatacccgttgaaaacacaatactagaataaaaaaagggaattataggtgggagggtagtaggcttgcctgagggtgttgaacagaaaacttgtgaaatagaggataactagtaatagggtctttgtaggaaggtcctaaaaggtcaggggtatgagtttccatgagacggcccaggttggtgtgtttggattgctctctgaaatcaaaaagcaaaaaatgaaagatgaattagagtttgtgttgaggtagtggtaagtcataaggcatagtaagagagatatacagagaagggaagcaatagagtgggagggaagaatgttgagagtggtaaacagactagtagagaagctgatgcaaggagtgagggtaagatggtttgagcagtctccgagtgacaatttggcgccatatgtgtgaaggagactgaaactcagagaggatatccctcaaactcaaagcatgatataattcattgccttctgacactgttaagcctcctgcattcaccaaatcctccactcccaaatcccgcacgctcttccccatctctcgcgatctctgatctttccaacttgcagaagggttgttgagtacttgagtttgaggtcacccaagttgaacatgcagtgccttcacatcacctaacacttccaggtaggtaggtgactatgtgctgccaacgaaagaaggagaaattattactatatgatttagattttagatatgttctttagtagtactaatattaaaaataaatggggtggtccacagtccacactatctataacaatcttcaagcttcaaccaccttcacagggctctgtcaaggaaaagtttcttcgcggtgaacgggtgaagtgatgtgcctgagaccctgagttgaaaattgaagttgagcacctagtccttttattacacctaccacagttcttacttctcgatatagttatattaggcttttaaataaattgataattattggttatgttattctgttattagaattaaaatccattaatttaaaatctaactttgataattataattattttagcctcccaattatataattgacgttgaatgaagtgagatccagatttaagtattagagttggaataattgtccttgttgtgaggaagcgaggaagaggaagaagaagaagattggggcatggttgtgcgaagggttttggagtgggaagtggtgagaatcctggagagatgcagcagcctgaatcaggcgaaagaagtccacgcccaaatctacataaagaacctccagcaatcttcctacgtactcaccaagctcctccgcctcgtcaccgcgctcccccacgttcccctccactcctaccctcgccttctcttctcacagctccactccccaaaccccttcgcctggaccgctctcattcgcgcctacgctctccgtggacccctctctcaagccctgaccttctactcctccatgcggaaacgacgcgtcagtcccatctcttttaccttctccgctctcttttccgcttgcgccgccgttcgccaccccgcgttgggggcgcagcttcacgctcagacactcttgcttggtggcttcgcctctgatttgtacgtcaacaatgccgttatcgacatgtacgtcaaatgcgggtctttgcattgtgcgcgcaaggtgttcgatgaaatgcctgaacgggatgtcgtttcttggaccgggctgattgttgcttacgcgaggagcggtgatatgagggccgcacgggacttatttgacgggttgccggttaaggatatggtggcttggactgccatggttaccggttatgcgcagaacgccatgccgatggatgcattggaggttttccggcggttgcgagatgagggtgtggagattgatgaggttaccttggttggtgtcatatctgcttgtgctcaattgggtgcgtctaagtatgctaactggataagggacattgctgagagttctggatttagggtaagaaataatgtccttgtggggtcggctttgatagacatgtactcaaaatgtggtaatgtggaggaggcatatgatgtctttaaaggaatgagggaaaaaaatgtgttttcttacagttccatgattgtggggtttgctatacatggccgagctcgtgcggctattaagttgttttatgacatgttggagaccggggtaaaaccaaaccatgttacttttgtaggggtgcttacggcatgtagtcatgcaggcttggttgaccaagggcagcacctctttgcctccatggaaaagtgttacggtgttgttccaactgcacagctttatgcttgcatgacggatcttcttagccgcgctggatacttggaaaaggcacttcagcttgttgagacaatgcctatggagtccgatggagctgtgtggggagcacttctcggagcatcacacgtccatgggaacactgacgttgctgaaattgcttctaagcgtttatttgagcttgaacctgataacatagggaattatttgttgctttctaacacttatgcatcagctggaagatgggatgatgtgtctaaggtcaggaaattgctgagagagaaaaatttgaaaaaaaatccagggtggagctgggttgaagcaaaaaatggtatgattcacaagttcgttgctggtgatgtgactcatccaaaaattaatgagataaagaaggagttaaatgatcttttggaacggctgaaaggtattggataccagccaaacctaagttcggtgccatacggtattaatgatagagagaagaggcttttactaatggctcatagtgaaaaactagctttggcatttggattgctgagtaccgatgttggttccactataaagattatgaagaaccttaggatatgtgaggattgtcatattgtaatgtgtggagcgtcaaaagttacaggaagaaaaattgttgtgagggataacacgagattccaccactttcttaatggtgcttgttcttgcagtaatttttggtgaccgaggctatatagccatatgcgggtgaaaagttgacatattgatgttgaaagaaaaaaattgaagtgagagggacctttttccatttgtgataaattagaggcttgtaaagaactgttttgttgaaattttagatcaactgcatacttgttcatcttacagggttgttcaatttattattgaagagtgttaaaaatggatagggaagacaagtgatgccagctagtagacaaatttgtgtcctcggcaaagcaaatgtttgtatagatacatgatcaatgttgttgtgtagtaacattaagagttgttacatagagtgagaaacaaggattgtaattggggaatgagagaaaccgtactgcattgattatggtgccatcctgaaacttttagattggtaatgacaaataaagcaatgcttagtaatagaaagcaaggagtaaagagatactgaagaaacaagctaaaataagttaaatttgatcttattattaaaagattcaattagaatttttaatttttaaaaatatttaattatgtcattttatttttaaaagtttcaattaggttttatttaaaatcaaatttgatttgatttttaattttttctgaagcagatgaaaaaaaggatcaaattgaatttattttaaaaaataaaggacaaacaaaacttttaaaaataaaagaagctaattgaattatttttaaaaattagaggaaattgaactttaaaaaaaaatataaaaaaaaggagaatgttccaaccagagataagtcaaccaccagtaatgagacaactaatatatgtcatatttatgtgatgaccaattattgttcaagaccgaaacatggcttcatggaggctccacttcaaatgctcgttacagttcattagtgattcggattttatcacgaaatatattgtgcttgaagaaaatacataattaaggataatgcttttttagaattgtaaacacgaatacagattttgagacaaaacaaaatttaaaacctcgtggcaggctctgagatagtgtcatatgtcacattctacgactatgaaatataagtggtgtgatttcaaggtggaaaaaacgtacagttatcttctttttatttttctataaaataagcccacatgcactgcgcgggtgccttgtacaaaaatctataggattattaaatgatcaactgcgagagcacattaaaatttatatgcctgaaaacaacattttatgtaagtggtcatcacgaattaaactttgtttcaatttggttgaccaatccaaagaactaaggcatgaggtgaggacaaccactacagctacaagccaaatacaaaccccacattagtttaggcattagccaagacttccaagattttagataaaaaggatacaagaaacaaaatacgagctctccactactctaagccacaaaattaaatttaacctatgatattttcctaagcctctcacatgaacctatatatatatatatgtatatatatatatatgtttatgttatctctaacttgattgctctcatacagtatggagtatcaaaaccaaagggccaaggagggtagattctgtgagaaactcgagatcaagaataagccgaagtttgtaggagtgagacaaagggcttcagggaaatgggcagcagagatcaaagacacatcaaagaagattaggctttggcttggaacttatcaaactgctgaggaagctgctcgagcttatgatgaagctgcatgcctccttcgaggttcaaacactcgcaccaatttttctactcaagggtgtggcattgctacaaattctccgatatctctcaaactcagaaacctgcttgatcgtaaagccatgtcaaatcaaagtcaaagtcaaattcaaagccaatcctctatgataagttccactttccaaggtgctgctacttcagctagtccaaatgttagtgccatcaataagatcatggttatggaaaactactctgcttgtagtagtgaaggtaagtctttgtttttggttcagaaccaccaagtctgtgataacccgtatggactagatatgaatatgatcaactgttcaatgggtatcacaccaaatacatcgcagtttgattattcttggccattagcccaacaaaggattaacgaattgccaatatcaaaagatgattttggtttaaatgtagaaaggcaattgtcaggatatgccaccaatgagtgccatgaggaggatgcgtatgaatatgatgtcaattatcctctctcccactttttctgcttcacttgatatctatcttaatcttcctatctcttcttaaaacatagtttctataatattgccttgtttccatgtcattttccctgagaggataaatcaagagtcaagaccattgaatttctaaacccacctctgcttcaacaagtgcttataggaatcagtaacaagatttttggtaccatggtactttgcccagagtgaaacaatcctttttaactcctcaaagttaacccattggatattttgcaagctcgtgatcacttacagtcacaccccatctcagtataataaggaagactaatgtgccaagtcaaatgtgtacgcactatatatcagtcttcattcttctacaaatgtactcagtgcttacgatatattcaatcccactccttatggttggataattagatgaaaacggatattaagatgtattttacttttttgtgttacatatcacctttaaaataatttctgcacacacatgtaagtgcatctcctagctaggttcacttatgggtccatattattttgtgatcaagtcatgtataatacaagtatttttgtttaagacttttgtaaaagctacctcaaccctgtcctataatattagactggtcctagtgggttatgtataatacaagtattaaaatactgtaaaagaaaataatgtttaaatatgaatgtccttaaaataaacaaatgactacgataaaataaataaatgctttgtttaacccgagggattgactagggtttgtggagttaacctcctgtctctactaagtcaaatccaaccacttatgttgtgatcaacacccacgtcgttgatgaggtgtctggaatagatcgtaagaagtttgaaaatgagtctttggtggagttaaacacgtccccacttccctcggggataggacccacgacttgctaactgctaagcatgattgagaatggtcccaccgcttaaaatttttggaataattgatcatgccacaataattatgttgaagaatcaaataaccgttccaaatagttattgacttaaagaatagagagacattggtcaaagtgtcacaaataaaaaaaaaatgtcaaaatgtcatactccagaaacaaattgtcaaactgtcatgccacgtaattcgttagccacatcagcgaattacgtgggctgacgtggcgtcgcgtgagtgaaggacataattcgctggaaggggtgccaaattaggtatgccacgtggcaaatttttcgtaattgtgtagaagcttcggaaggtcataacttttgactgggacgtccgattcacgcgaaattggtggtcacgcgctcgaaattgagaggagaaggcttaagcaagtcccctcaagggacttgcccaaaattttttcccaaaagaggcctctaagtgtctcaaaattgcgatttagtatttggacaccaaaaaaattcatttttgtctgattttttaattatttaattatttaatttaatgttattttttatttttttcaattacttctctgaatttcgagctttttgacatatcatacgctttcatcggacatttctatcaaaaaatatcactgttcaaaggttatatgaagtttatatgcactatcaattaaacagtgatatttttggctaggaatgtccgatgaaggtgtatgatatgtcaaaatgctcaaaattcagagaagtaattgaaaaaataaaaaataacattaaattaaataattaaaaaaagcagacaaaaatgaattttttggatgtccaaatacaaaatcgcaattttgagacacttagaggcctcttttgggaaaactttttggataagtccccaaaggggacttacttaggccttctcctctcaatttcgagcgcgtggccaccaatttcgcgtgaatcggacgtcccagtcaaaagttatgaccttccaaaacttctacgcaattacgaaaaatttgctacgtggcatacctaatttggcaccccttccagcgaattatgccctccactcacacgacgtcatgtcagcccacgtaattcgctgatgtggccaacgaattacgtgacgtggcaacttgacaaattgtttctgaaatgtggcattttgacaatttttttttgatttgtgacactttggccaatgtctcaagaatagatatgcagtaattctctcttgaatttttaagctgtagaatggggctttgtgtgcgcctgagcttgaccggttatattacattaacactaatgataccaactgaaccgttttttttttttttctaacaccaactggaacttttttaagtctgctaccgacaacttcatcctattagccccattcgcatattattttgaaaggcgtgtgtttgagtgactttacaaatttgattttggatgatcttgatttgttttaattaaattaatcttaattaaaattgaattttgaaaaaaggaatttatatttagaattatctcaaccaaacttgtaatataggtacaaattttcaatcgaagtaacgcctgccaaagtcacatggttttgtgaatttacagtattgaaaaacaactgagggatgcttaaacaaaccacactaaccgaattattattgagcagagcttcccaacagtgtttactacaagttttactaagctcagatatcttattaccatttattttccaactcatgtagagtttattttccaattcatttttccatatttaggccaaaccaaacgcagcttcgtacttcccaattcaggcgtttcaagtttcattctgaaggttctgattccctcaattccatactcggaaattgttatctggaacatccgtattcatacttcctaatttttagtaatgtcttttttccagatagccttgcttgcaacagtttttacgcgccttgacttcacccaacactgataataataaacttaaacaagcgtacaaaaatcacaaattaatcacatcgattcccagaatgaagcgaattgcaaaaaacatacaaggggtacgtttttcacggttcaaaaagagatcatcaaaacggaaatctggtaaaatttgcgacataaacataagaaatcaacttttgacatggacaattctgaatacatgactgaggatcgcaaacaacaggtcctaaaccaccaaatagaagcataatgttgatcacttcacagtttgaataatggagaactatatcacacaggagtaaaaacaaaaaagaacgaacaataatggttcagggtaatgtaacgaagcatataccctttttactcggaaactgataacaaaaaaaagccttcaattatcaatagtcctctccttcctcatcatcttccgctccttcagctccaacctcctcatagtccttctcaagagcagcaagatcctcacgagcctcagagaactccccttcttccataccctcaccgacataccagtgaacaaaagccctcttggcatacatcagatcaaacttgtggtcaatgcgagagaacacctcagcaaccgcggtgttgttgctgatcatgcatacagcacgctgaaccttagcaaggtcaccaccaggaacaacagaaggtggctggtagttgataccacacttgaatccagttggacacctatcacaatcaacaacaacaaattcacaatgttagatcaaaaattgaaaaattgattttataattagaattgatccttaagtgaaatgaatcatgttgaagtgttcttattctaaaatgtaagttaatggcaaatctcattataaactttctgatccaatgcaaacactacctaaggtttgcttcaacctaaaagttaaaatcaattctacacccagaatcaattcatcaatgagagaccaaacaagtgaacatttccctaaaatcatgttaactcgcatttcaatatgatattagatctctcaatgtgagaaaccaaacatgaacttgtatgtttggctccaggttccaggttccagatcacagatggggtttgttcatgttcactgataatccgacagttatagcctccacaactcaaaccagtttacaaacacaaatctagtgatgaatattagtaaatgtgagtaaacatgacaatggacaagagaatgagagaaaattataccaatcaacaaactgaacagtcctcttagtcttgatggtggcaacagcagcattgacatccttagggacaacatcaccacggtacatcaagcagcaagccatgtacttgccgtgccttggatcacacttggccatcatgctagcgggctcgaacacggcattggtgatctccggcaccgacaactgctcgtggtaggccttggcggcagagataaccggagcataggacgaaagcatgaagtggatcctcgggtagggcacaaggttggtctggaactcagtgatgtccacattgatggcaccatcgaacctcaaggaagtggtgagggacgaaatgatctgggaaatgagcctgttgaggttggtgtaggttggtctctcgatgtcgagggatctcctgcagatgtcgtagatggcttcgttgtccaagaggaccgccacgtcggtgtgttccaggagggagtgggtggagaggacgctgttgtagggttcaacgactgcggttgaaacctgtggggaagggtaaatggtgaaccctaatttggattttttgccataatcgacggagagacgctcgagtaagagagatccgagaccggaaccggtgccaccgccgacggcgttgaagacgaggaagccttgtaggccggtgcagttgtcggcgagcttgcggacgcgatccaagcacagatctacgatctctttgccaactgaaaatggggaaaataaaaaataggtcagacaaagtgaaaattaggtcagataaattgaaatagagtgagggagggaaggaggaacgaaccggtgtagtggccgcgggcgaagttgttggcggcgtcttccttgccggagatgagttgttcggggtggaagagttggcggtaggtgccgcagcggacttcgtcgatgacggtgggttcgaggtcaacgaagacggcacgggggacgtgcttgccggatccggtttcgctgaagaaggtgttgaaggcgtcgtgggctacaccgaaggaggagtcagaaggcatcatgccatcgggctggatgccatgttcgaggcagtagagttcccagcaggagtttccgacctggatcccggcctgacctatgtgaatgctgatgatttctctcatctttcttcaaaggctgagattcgattgagatttgcaaagcgtctctctctatctttacagctacttactacactcactcttaagtcttattgtcttaacatcctcctcagggttcaaaggggaatttcataaatctttacaatccgccccgtttggccccagcctatccgaccccactccatccattccgcatctcacaaatacatccacaattacttttttttttttctatccttttaaaatagttttactaaagtaaaaacttaatattaatttactcctcacattattttaaatgatttaatttgattttcaaaattttaaagaatttaatttcattctcaagtttttaaaaataaattaatttgatttcaaaaatttttaaaatttcaatttattcctcaagttttaaatttttttaagaatgtgagaaaaaattgaattattttaaaataattttggaccaagttaatttattttaaaatttttaagattaaattaaatcttttaaaaattcagaaatcaaaattattcatttttaaaattttgaaaatcaaattaaaccgtttaaaattatttaaaaaccaaaattattttctagtattctcttcttttttctttttttttacaaagagaaaagttttactcactttctctcaaatccgtaactatctttttagtcattttcacccaataaatccaaactaatctaattttattttcttttaaaattttatatacaattgttaatctcttactaatctaaaatttaataaaatctcccacgtttaccaaattcacaaaatatcttagtatgaacaatttccaaatttctaaactctaattattcgtgctgtaaaaaaaaaaactctattttttagaacaatttattatgtttcaatcaccacgaactaagctcaacatgaatcatgggacttcaatagtactaatggttggcggtctagtaaaaagagacatgaaatagcatatgagaatctcaagctccaccgtttttctactaattcaagttggataatattaagcttgatgaagaacaaccaactaaaaaaacaaagagcaaggttcaccccaagggatcataaaattctcatccaaacatggttacatgttttcaatgatgcagttgtaggggtgaagagaattaaagggatgttcttttgcggtaagaattaaagagaaatacaataagtatcaggcctatttgcaagtgatggcagcagttacacgactaaaatatcaatgataaaggttgaatagcatagttaatttttttgcaaagtgataccaacaagcttgcgaaagaaagaaaaatggtagctctaagatgacatcaggagatatgcatataagatttattctcatgatgtagatcaacgattcaagtagaagttatgattgattattattgaaaaaagagacctaaacgatcagatacattatttatagagctagttagagaagaaagtttttatcttctaaagtatactcgtctcttctaatattggacatcccatcaagtaatgaatgacgaaattaacaaatgtcaaagatgaacaaatcaagttgaagcaattagagttaaaaacgaggggagattttgggttagagatcatcttcaaggatccatcctagatgatagaaagaaaataatgagattgtaaaatattgtgttacttaattatagaaaaacatagaattacgtaatgtagtgatgttagtcaaactattttttataacaattttattataatataattaaaataattacaacataataaaaaaaatgttgctgatgtaggaatgtaaagtcacttgtggaactcagtaaaaaatataaaattgtcgagttggagagaagagttggatagattatataaaataaaaataaatgatacatgtgataataagatcatttagatgtgtttaaaaaatggtattgaataaaataattagataaattgattaagtagaatgtataagttattaccgataaaaaaaaaaatgggattcttaagatttaagataggatgtagacacttctatctactaggattacataagttgcaaaaaaaaagtagttatgtaattttaaaaaattaaactatcaaatatttagattttttatatataaaaattaattctaaaggaaaaatagaatttaaatgttatatttcaaaactagaataacaatgaattattttaaaaacattatttaatttgatgaataaaataaatattttaaatatattcttatatatattactgtcatcctcaccaagtcattttattaacacgagtgttctgtataagaaaaatctaataactttatggaatagtggtagaaagattattacattccgtcttagactttaagctattcattttaactatgataatagttcaaaatattgattaatagagaatcaaaatagattatctggcaaaatgctatgatctttacatcttgaagactttcaaatatgaaaatacttgacattccgtatgagaaaaaatgtattttaataaacgaaatattacgaaattgtccttatgtcgcgaagttggattggtggagcagggcggccatgtgctgccagccactgcccattactgatgcttacaattattagcagacaacgaaacaaaataacagcacagcacagtggttctacttgcttcgttttcagtttcctccatcaccaatttaccattcactcctccttcctgcatctaaaaaatatctttatttcttcaattccaacaccaaccttactaataaaacaaaacgcatcaaccatttcaagcctaatggtcaaagagtatatttttaggccatttatgttgcagtttttgttttaaaataatactattttttaaaaatatttgcttttaaaagttttttaatactatttgtttcacaagcgtgattaaaatttatttatcaacatagtgtgacataataattctattctttaagtatgtagttatgagttatatcccaagttcgtaatatgaaaaaaattatttgttcaaagatatcaattttgtacatatataagaatatatttaaaatatataagaatatatttagttaacattttatcaactatgaaagtacttattggttattgatgtaggatatcttggattcataaaaaaaatatagttaacattttataagaggattaaataaaaaaagtnnnnnnnnnntgatccaaccaagagaattactgtcttggaagctctccaacacccgtatatggctggcctatatgatccaaggtgcaaccatcctgctcaggttcccatcagtcttgacatagatgaacattggggagaaccgatgattagggaaatgatgtggaatgagatgctacattatcaccctgaagctgcttctaccaatgcatagattattaattcttccaaggctttctagtcccgttgcttgtctcaagggatagttctgatttgccctagataaactgtaatcttaaaaggatttaactaccgaattttgtactttgcatgagattactttagaacctttttaatttgacgtctccacnnnnnnnnnnttcaaataaaaagtaaaattataaaaacatctacaacgtataaataagaataacgtaaagcgatttatcatagatttgtgaatctatatgattaaaataatattctaaaatcccttgatccatatagctttagtttttttgctacacctattgctttagtttgttaaaaaaattaaattaatgttagaaaattataataagtaattaaaatatattcagtctatcataaataggtagaatagcatataatattaatggaaaacttgctagattaaccgtttttaaagattttagataacttctacttatttctataatttgtatttacgtcctttaaataaacataggttaaagaagcgtttggctattatcaaagaacatgatttgttagtatggatgttaagattttgggaatccccaccttaaggacttaaattctttgacggtgctgtaaatttattcctatacacctattttatttttttttttggactctgtttcttatgttgcagtggcaaggactaaataatgtatacttcttgctgggttggtaatgttgttgatgggaaattccctacatgatgttttgaggcatgcatgaatgggtagttgaatcttgcttcaaaagaggtgaatttgtgtttgtgatgttttgggtcatatgcttctatataggataggggtggatccagaaaaaaaaaaaataaataagggaggtaatagtggcggggtttggaggcggcgtctccgatttttttttttttttgtgaagaaaattnnnnnnnnnnattaagttgaaaataagaaaaagatggagaaaagaaaagatagaaagagaaaatgataaaagtaacaggtgatatgatgaaatagaataggatatagaagtaagatggaagaagaaatgaacatatataataagtattttcataaaataaagaaaataatagtaatgatatataatcaacttgtaaaaaaatagtaatgaaaatcatcaaattaaatttaaaattaataaatatatttgaaagagataaaataaaaaatttagttaaatgttgaattttgaatgttgaatacattgaatagcatgggcggatccagaaaaaaaaataaggggggcaatagtggcggggttcggaggcggcgcctccgaaatttttttttttgaagaaaattaaaggaataaattattataacaaaagtgtgaaaaatgtacaatttaaaagagaaaaaattaacaaaattagcatgtgatgggtgctcaaaagtaacaagagtgtagccactgcattcataaaagttacaaacatacatatccacgctcactcctttcttatttttcattttttttattattctttttctatgcttttcaattttttctcttatacaaacgtttaaactattttttattttactttattttattattataaaaaaaaattctattcttgagaatttaaggggggcactgcccccccccccaattgttaacctacatccacccatgcttctatgaatgagtactgttataatagtttgacaataccttaatcaatgttaaaaacaataaaaatcatgcataagaaaattgttgaaatatatttactttttgagggagagcaagttttggctttaatcataaatggatggtgctacggcgggaatcgcaatagttatatgcacagttgtaaaattttctcatgtcattaatttggttgagataatgagttagtggtttaattgattggtatttattttgattcgatatatattaaaattttcaaattatatatgtatctatatataagtatatgcttagtattatttgagtaagaaaagtttattaatactccaaaattcaaaatatatttttaaaaaaaaatccaaattttttataataaaaaatccattttttttttataaaaattgtaaaaccggtcgggttggatcggtccaatcgaaatcggataacctaaccggacaaatttgatcggatcaactatataatggatccaataatgaaaccgatcaggataaatcatcgggtttcgatccgatcggctgggtcggactaagttttacaacaatggttatatttgaaattttctttaaaataataaagaaaaaagagaattgattatttgtgtttataacttaagaatgaaaagactgaattgttttggttctttaaattgagtttttttttttttaaagaaaaagcaattcatctccattttattgggcatgttttattttaaaattattttttgaaaataaaaaaagtgaaagcttaccatcactctaaagataccttcattataatttgttagttgtttaatggtaaagatattacaactaaggtttagcttaacctaatccgttgaattttgaatctctccccagtgttcctgtctccagcttctctccatctgttttgtagaccattgggttgatctcatggctgaaatttatagttaatgattgggaaatggtgacccttggatcaatccaatggataagaaattataaataaaatagaatgaaagattgcagaaggcaaaagcatcgaggctcgtgaacacgaacaataacgtgaagtgcattatcccacactaatgtgaaatttttagaagtcttacattatttcatgattgtacaatcaatgtcactgttcgtaattatgcaagagaggttaaaaactacagccacacaggttattcctgtataagatatgaaaattacaaaggaaaaataaataaaaagcaaaaaagtgtcatgagcagaactttcgggaaaagattttgcaaaactatggcatatgcttttgatttcatgatctttgccatttggatttgcatttccctacataaatttctctaataccattatcctccactcattctcattttacttttcattctttattttacttataatttctcatccgttagattaatccaagggccaccatttctcattcattaacttctgtcatgagatcaatccaatggtctaaccaactggagagaagttggacagagacacgcaggagaggattcaaatcccaactctgtttgatgaacaagttaaaagttaaaacaacaatttaaagcaaatatcttttatataaatctccattattagtgactcaactttttttctttttccatatatactattttttgaactgaaaatcgcgggagagtaaaatatattaatcttaagaaaaatcgataaaatgtactaaattatcgatgcgataataaattaaaacaaaacataaagatgataaaatatcaaattctatagtccaggtaacagaaaataaagtattttaagccaaattataagaaattaaaatgtaacttatctttttttaatttaactgacaaataaatattagaattatctacttttttagagtatttttagtggtaaatcttaaattaaaatgttagatcattttttggtggacactatagtaccacataggattgaatatctctcaagatttttctaatttatttctttaatggtaaatctcattttgagatttcaaagagtaagaaagagaaaaaaaaattattcttttttaaagaatatacaaattttaagagttcttctataataattcattttttatattagaaatccctttatcttgaaagatttagtaaaaatcagatcttaaacttaaaatctttattcaatagtaacactaaagttaaagataaagataaagatgctcttacaccaccatatgaaaatccgaagttgggaaccattattaagtttcagccacatatgagtcatgatagaactgtatgtattaaaatacaagatcgtaaataccatagtcgcataattcttcgttggcatccacgtggcatgatacttgtaggcatgtgcaggatttgtaggcttcatttcattcaaaataacatcaatgaatacaactaagaatatatatgatcaaaaatattgaatgctaacaaaaagacaatgatactctatctaacttatgaacaatattattatcttagcttccttataaaaattaccaatgataggacctctctacacttaaccaaaattatctcatatgttttgttgccattgcagcacattaaatcatcgacaacagctttacactcaagctcaatgctaatgttctggtatccaagctgctgaacccatgtaagaccttgtaacaatgtcatatgcttctacttctgttggacttggttctccaataaaaagtgaaaaataacaagataatgtgaaaaaattaataaattgagatttgaagaattataaaaataagaattaaataatagtgaagcttatgtatcaccaaaaaaaatataacataataatctcatatacacatccctgcaccaaatttgaagtgtagtgtttcgaaagatagcagcatctatatttaattttaacgagcctggttggggaggagaccagctgtgatattcgtgattttggactgcagtaggtctgtgaaacatgtttcatctagcaaacttccattcgtgtaagaactgagaagagggggagatagatatttgtggatgaattagtgtttcttccaaagttgctggtttcttcgagtccaaatagtccaaagaatgatggctagctgctccctatcctcgtgtgagagagagagagatccttaataccttccgccacctgaaccttctgctgacttttaggccaaaatcctgataattgccaaatagaaattgcatgatcacatccaaagaacaagtgccattcattctcaaaacctgttccacaaaaaggacaagcatgggtgcatgagaatcctctcgtttgcaatctgattcttgttggcaagcaacctcgtaagatcctccaaagaaaatgctttattttgggaggaaatttaaggttctagatttgcatccaatcaccagcttccttgagatggtcagtttggatgatggatttcataatgcgaagataagctgtccgaactgagtaattaccatttttaaaatttccaaagaagttgatcttgatgcgtcacattcagcaaatgtattttttgaatttcatgaatatcacgatggcagaaaaaattatgaaaaagatccatacgccaatcattggattgatgttcaatgagacaacttacattgagattacttaagggaccaagtggaggtgatgatgaaggatagaactatcacttgcctttagccaaggttgatcccaaatgcagacgctattaccattgcttattcttcatcttttactttcatttgtcattactcctcaagcatggatactaaccaaacttggattgtgccccaatcgatccaaagtgtggacttcgttattaatgataactgtatacgatatagtagtatcattgaatatgagttttttttttactcttcttttttttatgagtattgataaaatttattttagttaaaattaattttagagtgatatgatttatgtttaaatatctttattataaaatcaagttaaaaataaaaatacaaaattttggatccaacttaaaaattacttaaaattgttttaatccatatttaattttagatccaaaatcaattttaattttttctctaataccaaacatatgaaaacattttcaaaattaattctgaactcaatcaattcttcaacttgatatcaaacatgcacttattccctcagtcttaaaatattatacagttctacaatattttttatgtctcttttaaaggaaaaatttgtttatatttatacattattttaatacattaagatgaaatttgttattattgtttttgttattttaattatatttttacaaataataagaagaatatatgaaatttcaaaataataaaaaagagatataaagaatattaaaaagttacaaataattttaatacaaatgaaaagatcgttttcttaatgtatatgctagaattttaaactagagataaagaaacggagaaataggcaaatagctatctagaaaataattttatttatttttaaaaattacaacagtaaaattaaatgtcaattttttctattatttttatttcttaaaggatactggttaagttttctctctctcctgtaagattatcttaacttatactactatcgtttttcttctgaaggaatatgactatcgtttttatttggcacttttaaagaaaatttttgtttttataggctaatatttgttagggagggattcactaatcacaacatacaacatatttaccaattgttcgacaccaacataatttcttggatacaaccatttgcatatatatcgcctagtgctcattactaatttgccacaataaaaagtgtttccaggaccgaatgtataaccccgtgtatgccagttatggatggtgaagctttcgggttgctgttggctatgaatttcttcatttctttgggactgcaaaatgttgattttgaaactgactgcaaaggaattcttgataaagtcaataggaatcattctgatatttctgatttgggcctcattatagctgaatgtaggagagtactgtctttacatccaagtttctgtcttgaatcttgatgttgtaaggagataaggcaatggagttacatatgctttggcaaaagtagctccatcttatactggtttccaagtttttttttattatgtttccctttgtattgttcatttgatcattaataaaattcattgaattgacttttgttataaataaataaaaagaaactttaagttcaagttgaaaaagcttcgtgaagcacttgaatcaaaatcataaaaaataatataaattaaaaattcattatgagcaataaaataatcattataatctgaaccaaatcaattaaaattggtttagttataaaatttatctttttcaatttgaacaaacccaatcaattattttttcacttttaaattagattaaattgtaatttcgatacttttataatttttattttatgatattggtcctttcattttcattacaaaataaaaagtcaaatttataacatattagttgtctaatagaatgtctactttgtttacaaaactcatgtacaatttttttaacatgctacatgtataaagtatttatatcgggtccagagttaaatttaagttaatgttttcctttcaaaataaggattgtttttttttttattttgaaacatgattttcagtccttcttttagtgatgtaaaannnnnnnnnnnnnnnnnnnnnnnnnnnnnnnnnnnnnnnnnnnnnnnnnnnnnnnnnnnnnnnnnnnnnnnnnnnnnnnnnnnnnnnnnnnnnnnnnnnnnnnnnnnnnnnnnnnnnnnnnnnnnnnnnnnnnnnnnnnnnnnnnnnnnnnnnnnnnnnnnnnnnnnnnnnnnnnnnnnnnnnnnnnnnnnnnnnnnnnnnnnnnnnnnnnnnnnnnnnnnnnnnnnnnnnnnnnnnnnnnnnnnnnnnnnnnnnnnnnnnnnnnnnnnnnnnnnnnnnnnnnnnnnnnnnnnnnnnnnnnnnnnnnnnnnnnnnnnnnnnnnnnnnnnnnnnnnnnnnnnnnnnnnnnnnnnnnnnnnnnnnnnnnnnnnnnnnnnnnnnnnnnnnnnnnnnnnnnnnnnnnnnnnnnnnnnnnnnnnnnnnnnnnnnnnnnnnnnnnnnnnnnnnnnnnnnnnnnnntgatgtctggtcagtagggtgcatttttgctgagattcttggtagaaagccaatcttccctggaactgaatgtctcaaccagctgaaactaattataagcgttcttggaagccagcatgaatctcaccttgagtttattgacaatgcaaaagccaggaggtttatcaaatcactgccctgtactagaggcagacacttctctcagctatacccacaagcagatccattagccatagatttgttgcaaaaaatgcttgtgtttgatccaaccaagagaattactgtcttggaagctctcnnnnnnnnnncatgtacaatttttttaacatgctacatgtataaagtatttatatcgggtccagagttaaatctaagttaatgttttcctttcaaaataaggattgtttttttattttgaaacatgattttcagtccttcttttagtgatgtaaaatgtaaaatttttcatattaaattcacttagatcaaaattatgtaactcaagtattcaactactccagcaatgtcaaacccaaaaagggtatatttacaatgatttttatgagtaataaaaaataaatgaatatgatattagaatttttattttctagttgcttgtgagactttttcatacaatttttttattatcattttttgctatttttagttaaattattatgtattgagttagtcataattataatcaaaattgtgtcccaaaataaataaaaatgatcattatttcacaagaacaacataaattcaaatttgaaagttggaaaaccaaatcaaataaatttttataagataaaagaataaaagtatattttatcgtttttttaattagactacgtagcaaatcaaatagcacaaatcaaatatttcaaaaccaaaccaaatcaaactcttcaaaatattagacttggaatcacaagttcaggaaaaaaaaatactataaaaaaacaggagtgatgtatggatagaaatagcactacgtagggcaagaataggaggagtcgaggaggtaacgcactttccctgcccgagttaacattgaatggcttttggttgtacttgtagccatagggttggtaccgaataattttgttagattttctacagattagttgagttgaaaggaaactagccaatttgtttgcacctgaatgaaaataataatgaaatttaagacgaaacggctgaaccaaaatctgtgaatgttaacgttagcgtggaaaagaaaaaggcaagacacgtttatattttagatttagatttatagttcccaaaggccaaacacccatagagtacatacttacgttgtcgtattttacattctctcttttacgggaaaagcaaagcaaacccaatcattattaataataatgccgtgtgggttggggtcgttgtcatgactcatgtgagtcatggggtatgccgtatgttaaaaatgttaatgtgcttatttcactttctttcccaaccataccctaaactaaaccctcctttgatattttattttattctatgcctttatgcctaggtaattattattattgttattattattattattattattattatatggatacgttatgatatatttattaatatgatgactatggctatagcctccttttcttctctagcctgatctcgattaaattggacatttattattgtttatatgataagatttgaaatgatatgaaatccacttcttgaaatccaatccattatccactctattctatagattattgcttgagctgtgcaaaattgattttttgtacagaatgtttacttgaagctccatcaattgaggagggattcttcatctttggattcgcttttggtgcctcggagtcagagctgcaaggaaagtggagattctgggatgaaagctgaattttgtggtatgaacgcttttctcactcttttggaatcaatttgatttggtttctttgttattggggtgtgtgtgggttgaaggctgagatcaggtgaagaggaaagataaaattgaatctttgttatattttaagaaaaaaaagatgtccaaaaagatgggcttggtgagaataggttctaaaaagagacaaggtgacatcaaaagatcaaaacccagatgtagaaatagcaactaagaattgattcgaaccttctctaacatggcataaaaaagtatccaatgattcaccctttatcctgcaacaatgccagtggatgtatatatgcattgtgtttctgatatttgtttgataccagctttaacagactgttgattgcttgtcacagttagtaaatgcatgattcatgcctataataatgaatttactgttgtgagttttattattagtcccctgtgtgtgttcacttattgagaatatattgtgttgctgttaatttgcagggaaatggcaactttagttgaaccccccaacagaattaagccaaaggggaagcattattacacaatatggcaaacattgtttgagattgatacgaagtacgttccaatcaagcctataggccgaggagcgtatggcgtggtgtgctcttccatcaacagggagaccaatgagaaagttgcaattaagaagattggtaatatatttgagaattctattgatgcgttgagaactttaagggagctgaagctgcttagacatattcggcatgagaatgtcattgctttgaaagatgttatgatgccaatccacagaacaagttttaaggatgtctacttggtctacgaactcatggatacagatcttcatcaaattattaagtcctctcaaccactttccaatgatcattgcaaatatttcttgtttcaggtactagccagtttgttatggtattttcctttcctttagctcttctttctaatttctaaacctttgtggttgtgacttttcttgaatttgcagaaatgtataaatattcatttgaaggagattttgttgggggttgaactatagttgcaatgcactcttgcagtgttttaattggcattgccatgcttcaaagtgaattccccattttcaattattaacgtacaacttaaaagtgaattaaatatcgaatatcctctttcatgaattcttatactatatcatcgggctgtttttgaggagttgggacaatttgagttgtggctttacattctctagtttgaatgtattactatgtttcctgagtcagactttagtgtttcagttccatgatttttcaggtgaagtctagggaaggggtctgtattctcttcttccggctagatattgtcatggtactagacaacgaaaatcattggcccaaattgggaaattgatatgaccttagcattgtttgattgaatgatgaagcttcttatgaaaaagaaccctattatggactattcttgtcaccctcatcttttctacatttttatgagttttgcagagaatgttgaacagaattgacaaataataatctacaagtagaaagcagttaacggattctttatgagcttctaatctttgcatattttaactattcttgtgaatgatactaaccatatactcttactttagctccttcgaggtcttaaatatcttcattcagcaaacattcttcaccgggacttgaagcccgggaatctgctcatcaatgccaattgcgatttgaagatatgtgactttgggcttgcacgaactaatggagttgatggccagtttatgacagagtatgttgtcactcgctggtatcgcgcaccggagctcttgttatgctgtgacaattatggaacctctattgatgtctggtcagtagggtgcatttttgctgagattcttggtagaaagccaatcttccctggaactgaatgtctcaaccagctgaaactaattataagcgttcttggaagccagcatgaatctcaccttgagtttattgacaatgcaaaagccaggaggtttatcaaatcactgccctgtactagaggcagacacttctctcagctatacccacaagcagatccattagccatagatttgttgcaaaaaatgcttgtgtttgatccaaccaagagaattactgtcttggaagctctcnnnnnnnnnncaaaaataatattcttagttataatattttttaaaatatgattcttgagattaaaatataatatcttgacaaatactcctataatattattattatttaacaagatagagtcgcatttgattcgttcgctgtttcaaaaattagcaaaatataaacaagaatcactctgacttaatcacatcttcatgtgacagtatgttcgtctttaagcttgagataacaaaaaacaattcaaaaaatgttgttaccaacgtatataaattagtaagaaatttataatttataatttattgtcaattgtcacaatgaacagacagatgacgtannnnnnnnnngatgtctggtcagtagggtgcatttttgctgagattcttggtagaaagccaatcttccctggaactgaatgtctcaaccagctgaaactaattataagcgttcttggaagccagcatgaatctcaccttgagtttattgacaatgcaaaagccaggaggtttatcaaatcactgccctgtactagaggcagacacttctctcagctatacccacaagcagatccattagccatagatttgttgcaaaaaatgcttgtgtttgatccaaccaagagaattactgtcttggaagctctccaacacccgtatatggctggcctatatgatccaaggtgcaaccatcctgctcaggttcccatcagtcttgacatagatgaacattggggagaaccgatgattagggaaatgatgtggaatgagatgctacattatcaccctgaagctgcttctaccaatgcatagattattaattcttccaaggctttctagtcccgttgcttgtctcaagggatagttctgatttgccctagataaactgtaatcttaaaaggatttaactaccgaattttgtactttgcatgagattactttagaacctttttaatttgacgtctccacgaggacaatggcatcttgtaacttgtatatagccatgcacactgttttttggtttttcggctaaaaacccatttgaactagtgttgttcatctgttgtttcctaaaatttaacagaaaagagtaagataatttgtgctttgaaatatatccatggttatgagatgatgttttccttaaataacacggctacctggatttcaatcgtgggatcattagtgaaccaaatgtgtttaggttcagacaaaaagcttaagaaccttcaatagattcttataatgtgcttagacaagcaataaactgaagtaattcttttcattcgagatcttattcacaagcttaattaactacggaatttatcgaaatatgttgaaaataattatagaaaggtcaaaaatcactttcataaccctaaatatagtctttcaaatgcctccttagttgatttacagttctcacattgtaattacttcatttctaagggactagtatcagtggcatttgcattgtggcacttaccacaggtttgaaaatcttgtgcttgtgctttaccggtacagcatcaatatcggaaaatgtatcagagtgtcatggaaagttcatcattccgggtatcataggcacgttttttgaaagggaaagttataaaacaaaatgaactatatttttttgatgaactttatgtgacctatgaggagtgtaatggtattttgaagtagaaacagtaaggagattataaaacatgtaaagacctcagaagtgcattttacctttttcttgcaagttgcaatcatattaaccattaatttggttgctgacttgactaacatggaactgctaatgtagactgcagaggaaggatattttttttggccttttgtttccttttatgccaaaatataaattcatattcagcattagcataaatttacatggtaatgaaattaacagtcttttcccccctctagaaatgttaatatgtgtgtggaaatcttaacataagccgatggtactaaagagaaaaatgatccatgaacagttagtgctcgcattcacctacagagagaaagatggagaagagagaaacgtaattggactaaaaattaacccaagaatatactctaaagagaaaatttaggataaaaaattaataacactcaaattacttgtcatcatgtaaaaattaatagcaataatagtttcataccacctagtattttattgaaaatagaaaagagaaaaaaaaaaaatataagcatctgaggtcgagtgtttactctgcagtaggagtgtgtatatcatttctctaatgataagtcggattccaagaaaatagttcacaatgggatatgtttactctgcaacatttaaaggatatgtttgccacactgataaacttcctgcaacatttaaaggatatgtttgccacactgatattactttttacatattttaagtaagttccatcatcacatattaaattttactttttacaacttaagcaacatttctcagcaaaacattaacttttatttattttttttaaataggtctcataaataattatacatcctcatattttatcatattaatttttattagttactttttttttttaatattgatgcgcctaaataagatataagagcctctgcttatttaagcaacttgtatttgaagaatgcttggtaatggcacgttaaagattggtttagtttgtgaaaaacaaattcatatcttataaaattatgagtctaaattttattgtcaatgtgaaaattttgttaataagtaatatataagtatatcggtaagtatttattgaaattatattcatcttgacttgatgagtcattccttaaaatccaactcacataaatttttcagaaaaaatcctattaagcaccattgcataataagaagaaacaaaatgataaacacctcattgaggcctaactctctgtaaaattannnnnnnnnnnnnnnnnnnnnnnnnnnnnnnnnnnnnnnnnnnnnnnnnnnnnnnnnnnnnnnnnnnnnnnnnnnnnnnnnnnnnnnnnnnnnnnnnnnnnnnnnnnnnnnnnnnnnnnnnnnnnnnnnnnnnnnnnnnnnnnnnnnnnnnnnnnnnnnnnnnnnnnnnnnnnnnnnnnnnnnnnnnnnnnnnnnnnnnnnnnnnnnnnnnnnnnnnnnnnnnnnnnnnnnnnnnnnnnnnnnnnnnnnnnnnnnnnnnnnnnnnnnnnnnnnnnnnnnnnnnnnnnnnnnnnnnnnnnnnnnnnnnnnnnnnnnnnnnnnnnnnnnnnnnnnnnnnnnnnnnnnnnnnnnnnnnnnnnnnnnnnnnnnnnnnnnnnnnnnnnnnnnnnnnnnnnnnnnnnnnnnnnnnnnnnnnnnnnnnnnnnnnnnnnnnnnnnnnnnnnnnnnnnnnnnnnnnnnnnnnnnnnnnnnnnnnnnnnnnnnnnnnnnnnnnnnnnnnnnnnnnnnnnnnnnnnnnnnnnnnnnnnnnnnnnnnnnnnnnnnnnnnnnnnnnnnnnnnnnnnnnnnnnnnnnnnnnnatatttgaagatatagttatcaaattttagcttatactacatgaataattaaatgtctagtttctcttaggaaatgggtagtctaacaattagctttaacttttttgttcttactaatctaatcagtgtcttattacattggtcaaaaaattaaaataaaaaatatttaatatgaaaattataaaaaaatcataaacaacaaaattttatacatttcaataaaatattaaaaaattaatttaagacaaatactaatcgatatttttgatattgattaaaaagttaaaagaattttttgattaaatgtataaaattatattaattataaatttgtacatacttctataatctttataataaatatttttttaattctttaatcaatatcctaatattttaacgacagattaacaatatccttaatttaatatctcaatattttctctcccgtacgtccaaactccaatctcagaaagtgagggggaggagtgggcaatggcccaagaatatgccagagaatctccgtattatcatgtgagactgtgactgtaatgcgatgttctttaccgatgaaaacgtcgtgaaaagaaaagcaactaatagcacccgccagacgcagggagtgctgacaacgtaaagtaacataatgagcatttttagggtggtgctcgtacgtctttgtatttggaggagcacccatgatatgatcagatcttgtaatagtaatatacagtatttcgtttttctaaagtgaccaaattttagaaaataacgtacacttataattattgaaaatagttgagtattgtaataaaaataaattaaatatatacattaaaatatgttaaagaaagctctatatatgctttcggtttatcaacgttcttgttgagaatgacaaattgaccatggatatgcatgattttggacagtgaggctgcgagtctgttttctataacactttgtggttacataatgttttcattttcatctcatacttcactttttttttttttcacttctgaaattgttggtgtcttctattttttggtcatagttggatatatgaacaatcaatttcgggtaccgtgcgtaaagtaacatgtcttccatttagcaactgcacacattcaggaaattttctgaagggtgatcagtgaaagcaatttgcggctctgtttagttgaactttttttatcagagtagtgtgtgtgagagagagagagactaggcatacttaaacacattcatcttttgtttttgacgattacttctcctagtcaatcaggtttgtaattcttagttctaactacataaaagccgacaaagatacataactacagaaacaggcgtcgaaattgtcataagattttaagaacatgtttagggaattcagaacaagttatttttttgactggtcacaagaaattaccttacttttaagttaacacaattgaactttttcaacagctccttaccaatacaactcgagtttctttattaatcatgtcaagtaaacattaacagttgagctaaaaatctgattttgttttggaaggggattgagattattatcaactcagaaatttccatcttatcggtagtattaatgatgcaataattgtgcaataaaatcattaaaatgtcatatataagagtagtctttttctaactaaattggactatataataagtttaatagataatcgacgcaatggagattatcggtcaaagagaagatgaactgaagcagccatctgatttttcctaggataaaattataacatcttatatcaattggcacaatgaagattattgagtcaaagaaaaaatgaacagaagcagccatctagtttttcataggatacaattataagttattctcccacgttgaaagcattagtaattttcctgaaacaggagtcataagtctttgaaaatattaaaatcggatttgctggcgctggtgatgtcaatgacttaagcggtaaggtttatatgcatagttgtaacatcatgaatgtaaccagaatcaatggtaggactggttcgatatttttgtctcttaattaaataatgggatattcattttagaaatgaaatcacaacttaaaatatcttttatcctattatagattgattcggtgagaaaaatattagttagatgtaaaatagaaatctaatatgcttattgattaaaaaaaatgcatgaatgtaagattagttgaagcttccgcgaaacaacatataaagttgaaaatgagtgagacccaactcaaaagggttgttctgcagacatgacttgtacctatttgtagaatatagtgttattaaaactctgcattcacattgaaaaatttggatccttctagttctagcttatggatgatgcaagagagagagagagaggaacctagctgacaaatgggtctcacttgaatcttgtatgatcttgctttctcttaactacatcaagtaataaaccaaggaatatatatactattctcatttcttttcttttctttggatcagttcacttgtagagaaatcgagcaaaaagagaataaataaacattaaaacgaaatgagattcacacttacattttattttaattcaaaattttatgttatttcattttttttttactctatggacgggtacctttttctcttttcttccttgtaaagtttagtgtaaacctcctctttaaaaaaaataggacaaatagctgggcaacttggactggcatggccacccttctggattttggtcgggaacctttttctttcttttccaacacaacccgtaactggaaccatgtgcttaatgtacatcgtaaatgaaataaaatattatggtggtcaaaagctggctctattgaaaaaagcatcgatcaccttcggtaaattaaataccagtatagtattgtgttagttatggtccatcatgtgacaataattgatttaaaattatttctgcagaatatggagtatagttaagtttgttaatattcgagttcaactcctctcaccaaaacctcacatgaaacgctgtggaaaaaattagtccatgtggaaaagatttcttaatgatgatagtaatattttagtaattaaaaatgtgaatgctgtgatttcaagatgtccatatttttggtagatagaaatataaatataatagcagtgacggattaatttaaacctaaaccatcttcaaattatatatctatatataacactacatcatcaatggctctaaacaatgtggaagttttatcttttatgcaccttacttttgaattaattatttgattcgtttatgtttacttaattattctgttttatagaatgttgaaatgattagagagagttatttgttgttttttcgtgagttctaaattctgtttcggtggtatgatttgtgaggaataaaaaaaaccattttaagtgattttcattaatttttgtattaaatttagataattaaagacaacggatcaattgaatgtaaaaataaattgtgcatatgagtggattatttctgtcgttaatatttttgacttggtcatatacgtaattttttttatcggcacttggttattatatacgtatttttatgtgtgtatatatatacagtactcccataatactctatggaaaaatgtttaaagctcttgatgtttcattaaaataacagggtagttaaaacatagtattatttgttgaagtaacttatatattttaaataatgataaattttaaacaaacttaaaagatgtttaatacatggaaagaaaataatcacacgttgaaattgattatgtataataataatttgagtttacagtaagaggtcaaaagcttttaattgtagctcacccaaacaaataataggtgattggcaatataaggagtagaatatcagacgccaaggagcaccaataaaaaccagaaaatgattattatagaaaaaccagaaggaactgcaactacctaaaattccactaataaataaatatttcaaatgggtggtccaacatctacgaagtagatcaccctcatattgcgtttccacttggtaaatggcaacatatatatactaggattatatatcaacatctttaacccaaattatatatgttaagtataagtaaataaaaataaaactgcgcgtgctcatgaacagaaacagtgaccatcgtcgtactgtgtgaccctttccaagtcctttccctctttcaccttctcttatttctattgacttttttaattttgcagtacacagcaaaaagcatgaagtccaaagaccaaaaaacctcactagccaattattttattgtattctattattacaatgggctatttttttctctataaattccgccccatgaatcccttcaaaacctcttccccttctcatcttatcctcctcctaaaaattggtcaaaatctatccaatctctttgcatattccttcttatcatcatcatcatcatcatcttctctgttgcctctagaattgaaaagttcttcttcctgcccatagtctttgacacccttttccaacctctagattttttcttccctctataattatctccttcacaccaaccttcttattccacatatcatcaattaccttgttcctctcaaagtttgattatttttctcttggattggattgctataatttttgttcatacttacatgttatgcagttatgaatgattgagaaacaacacaaatgtcttctccagtgatctccgagatcctcctctctggcttcaccataaactcttccctaagacgcaggacacacttggtgcaatctttctctgttgttttcctccactggttctacgttttctcatgaactaaataaattaacctcgtacatagtataaacatagtacgtacccgtgttcttttttcaaattcaatcattaaatctagctagcaaattagagttattattgttcaaatagcatactattgcatggcttctcctggtggaagtggaacctattcatctggttccagttctcttcaaaactctggttctgaaggagacagagacatcatggaacagaggaagaggaagagaatgttgtccaatagggaatcggcacgtagatcgaggataaggaaacagcagcacctggaaggtctgagtgcccaattggatcagcttaaaaaggagaacgcacaaatcaacacaaacatagacatcacgacgcagatgtacctcaacgtggaagctgagaacgcgattctgagggctcaaatgggggaactgagcaacagattgaactctctgaacgaaatgatcagtttcattaactccaccaacaacaactgctttatgatgttcgatgaggcacaggaaacgaccactcagctgttcaatgactgtggcttcatggattatgcttggaatggaataccaatcatggcttccgctgagaatgacatgttgatcatgtattgatcttgattgtaacacgacacccacgtcttctcttgttttaatttgcttttgtgttttacttgtaatagtaatgtctattgttttcagtttatgttatgtttagggttgtcttgtcttgtgcgtatttcaagaggaagattcttttttcttctcgaaaatgtaaaatatcgaccttttattttccaggtattattttcgttcatttccactctttattttattaaatgtctaatttatttttcaacttttaacttagtactatgttttacagattaaaagattcttttgaggaatgtgagcttgaaaatataatattccatatttgttgagaattttgttaaaatatatttctaggcattttttattcctagaaagtagtattatcatgttttattgtacttttatttctaaaatgagggttgaaaaagtcatatttttcatgggaacgtgaaaaatcatttttcaactcaattataacttctacttttattttttgttataattattttcatttttaaaaatatgtttagaaatattaaaatttaatcaaacattttaaaatatatccaaaaataatattcttagttataatattttttaaaatatgattcttgagattaaaatataatatcttgacaaatactcctataatattattattatttaacaagatagagtcgcatttgattcgttcgctgtttcaaaaattagcaaaatataaacaagaatcactctgacttaatcacatcttcatgtgacagtatgttcgtctttaagcttgagataacaaaaaacaattcaaaaaatgttgttaccaacgtatataaattagtaagaaatttataatttataatttattgtcaattgtcacaatgaacagacagatgacgtatgtcatataaacaaaattttaaaaccaatcataactagttaatgtgcaagttcttttgattaattgtaaagggggaannnnnnnnnntacttttattttttgttataattattttcatttttaaaaatatgtttagaaatattaaaatttaatcaaacattttaaaatatatccaaaaataatattcttagttataatattttttaaaatatgattcttgagattaaaatataatatcttgacaaatactcctataatattattattatttaacaagatagagtcgcatttgattcgttcgctgtttcaaaaattagcaaaatataaacaagaatcactctgacttaatcacatcttcatgtgacagtatgttcgtctttaagcttgagataacaaaaaacaattcaaaaaatgttgttaccaacgtatataaattagtaagaaatttataatttataatttattgtcaattgtcacaatgaacagacagatgacgtatgtcatataaacaaaattttaaaaccaatcataactagttaatgtgcaagttcttttgattaattgtaaagggggaaactaataaagtcggtggatgcttagatcttttaatttaggaaaagagacaattgtttcatttcatatatatgatatttttcttattctttcatttcgtttcatatatgatatagtgatacatttgtaccgtttcctaaaatccaagtgttaatttgtgcatgtgaatataatgtttgcattattgctgatgcatgttttcaatgttgaagagaataaatgggaaaagatataataatcaaagtgagaattaaatagttagtagttcaacatcctcttaaagaaatgaaaatgggaaagcaaagaattggaatctattgaatattttttccaccataatattaatataaaatatttactaattttattaataattaattttcgttaaaaatctatttgttcgttttttaataatttttttttctaatcatatttttcattcataaaattcaaaactgaaatctaattttaaaaataaatctataactactcaaactaactacttatttaactacttatttattattagatattccttcatgtgtgaacggaattatatcatgtatcagaaaagggcctaagcatggccactcgctagctcatcctgaatccagagaattcgaaatcaccaaactatagcctgattgtttgtgtgtgaattttttaaaaattacttttcattacttatatttttttaacaaataataaatttggaaaaaatccaaaatacaaaagcaaacagctttagattttttcttaaactttataaaaaaagttataaaaaatatcattaaaagttttctttttctttttgcaaactttacgtgattacgggttagtttgagtcatgatttgttttgtggggggaagtcataatttattttaatcgatcttagagaagttccataaaaaaatgagaattctacaataaagtctagccatttatgcaaatcatcgattattataccattttctaaaatataaaagtttaattgtgcattagaatataatattcgcattattggtgaaatggtgatgcatgccttcattgtttcgaatttcattgttggacagaacaagtgggaaaaattcacatattccaagtgagagttgaatagttagctcatcatccgtataaaaatgaaaatgcaaagacggtgtaagcagttcggacaaattatgaagcatgcagatgaactcacatctaaataattttaattttctagaactgaaatatttaatgtgtcgtaactcgtaataagacctaatcatgtcttcaggatcccagcatcgacccagaaaatccgaatcacttgattgtatatttgtattattctcacattcgtttgtgttcataaaataaaaaataatttataaagaaaaggctaaaaacagttgatattttttccagaattaaaaaagtagtctatgaaaaaagtaatctctttaaaaaaaattcaaacttatatgaccagtttgagtcatgattttgtaatgagcaaaagaaaagtaatcttttctaatcttaaagaagttaaaaaaaaaatatcgttaaaattgtaaaataaattataaccatttgtatcatacttccttcccagacaagctatcaagtttcaacgacacaagctatttcaaaacaaacggcaagatgatgataagtgtttaaggattataaataaataaatgagatatgatttagtcaatttatttttaaaaaataatcacttattttcatcaacatttaagggtgttttaaaaataaatgattgtttttatttcttttcaaaattaatgttaatcaaacatgggctaattactatatagaatgaccgaggtagttataagctttaaagaaaaattgtctagaaaaaccattcaaactttcacactaattatttttttgtttaaataaccgtgtactgcaaattagtcactggtctttgaaagagaaaaaaaaaaactttatccgcacttaataaaattatcccaagatgataagcaaattgccaatgttgtagttccttttggaggaggggaagatgtatctttccttttggaagagaagaaggggtatatgcataagatagataaaattgaagtgattctttgaatgttacaagttaaattaaaataaaatgatgccacctaccacaatgtttaagtgcatgtttagatttacgttctaatgactcaaacgttcgttcatttcaattattcaaggagaaatttttttcatttaaatgcattagaatgcatgtaaatgattactcaaacatagtcaaaggcagatgcatgtaaatgcattctaatttacatacgaataaaaacatctaaaatttaatcctctgcaatttcaaagttgcccattgcaattaaagacttaaatttagaagtttctggttagatataaatgtcatttaacatggtgatatatttttattctcaattttatttccttcttatctccatctaaaatagtaaaaaggtttttttctgaaaaaaattctttattctttgttttctttccttattttaagaattattagggtaacaataagtaagaagagcactttcaaaaacaggtattctatcagcccgctaaatgttttccaaacttgttaaatattcaataaccagttaaaattacaacattaataagaagaaaaaaattgtcctactagataaagttgattgcataattcgcacgacataattgtattggttaaagaccgaattctaaatgataaaagcagacatgataaaattaaaagcaaaaaaatataagggctgcttttagcttatttcttcagtataagcattgctttatttgtcattgccactataaagtttcaggatggtaccataatcaatgcagtacggtttctcacattccccatttacaacctttgattctcatctctatgtaacaatattcaatgttactacacaactacattgatcatgtatctatataaacatttgctttcccaaggacaaaaagtctgctagctggcatcacttgtcttccctatccatttttaacactcttcattaataaattgaacaaccctgtgaaataaacaagtatgcagttgatttaaaatttcaacatccttctctaatagtttatctctaggctgacacaaaacagttctttacaagcctctaatttatcagaaatggaaaaaggtccctctcacttcaaattttttcttccaacatcaatatgtcaacttttcacccgcatatggctatatagccttggtcaccaaaaattactgcaagaacaagcaccattaagaaagtggtggaatctcgtgttatccctcacaacaatttttcttcctgtaacttttgacgatccacacattacaatatgacaaaacccttcgcacaaccatctccgaatcttgttcttcttcctcccttgttcattccactaaccttcaggtcacaaggagaattattattccaactcatgcatggttaccagcatgagcatggtgtttgttacgttaaggcccagccaagcattagtgtggcctggatagaaagttgaggaatgtagcgacactctaaaactctcctaacactttttatgtaattggttggaatttggaataacttattattaattttggtaggttttattttttattttgtacatcagtgataaaccttttggaagtaactttgcaaatggtgattacttttaataattctaacgtactagatattttttattttatttattatatatatatttgtatgagatatttatgtttaacttttcaactaatgttaaatttaaatatttttattaaaattttaaaatgtgtaatgataaaataaataaattattttacatttatgttgtaaataaaaaaattattaatgttataatattcgaagttcttcaataatatttaaattttgttgacatgacattacattaaccatgacagatgacttgacatggatatggcagttgacgcagaaaacctagcctaggggatgttttaatgtgagagtataagctagaaggttttatcctcgatcatttctcttgtcaactgaaatatttaacgaaaagtttatcgaaggattattacaattgcataatttcagaacttgaagatttcaattgaaacttgaagaaccaaattagataattgtgatacttaaaggtccaaaagtgaaattaagcgattatcttttatctattgtatgtattttttccttatcacaattgtacattagctaatcaatgagttgcaataaagagtttaatttctatgctttttttttttgtgaatgtttaatttctatgctattagtgcaaaaaagtgcattttataagagaattatcctcgtaaaaaaatcaaccgttaacattttgtcaattctagtcattgttgcatatacatatgctctaaaatctcaatcactgttgcaacttactaatatagacatgctacttcccagcgattcaattcacttttaatgcccatctataacaccgatgtacgtgtccccgactatgaaagcatgaacttttccccccaatgattggatcaatcaatgccctccatcacgggattggatactttaaagtgaaataaacctatccaccctctaatgtaatttaagcaactcacaaaatttagtttgaaatcaagggtgcacacacccacacatttcacttcacatatttttttacatgaggatccaaatcttaataactcgaatacaaaaattttgcaagacccagatgcattcccatactacatacaaatcatatgcttttccctgccctcaagtaataccaaattattgtttgaagaaacaattgtctgcaaacttaatgaataaatagcattaaaatttcatatggtacaacttcatgctgtctgataaggaaataaaaccaatacaataggccaaaactgcaagaattgccccacagacaaccctatattctcacgcaatatggtaagaaaaaacaatagaggaatagaacgagaagctcaaccctatattctcacgcaatatggtaagaaaaaacaatagaggaatagaacgagaagctcccacgccacaattccctaacctcttttggactcaatcgcactattaacattcataatatacacattctagagaaagctccctttccaatcacaattgactctgcattctcaaaactgatacagaacaccatgcaagaatgaatgatggaaaccatcttatggcaaaaagaatgggtaacaaatatagagaccaccaaactggaaaaagcttgttcccaaaaagtgcaagacaccaactgccaagccagatgctatgaagaaatgatggatatgcagcaaaacaatgaaaactacgaagacaggatagattccaatgcaagttgttgctgcggctgcaaagatgaccaagtagaagcgagtgtagagggtggtaaagtttgctggagctgtctgagtaaattaaccatacgaccagctgtttgttctgtcgcaaggtctttaccagcacataaaacctgtcacaaaaaatgttttccattaaatggagaaataaaatcaaacaaatccaatataattatatatattaccaaaaagaagcattcactgaatgcgtccttgtttgatggaacaaaagactgctcattttatacacactaaggtattcacgggactaatgcacgaggaaaaaatatcaattaactatgtatacatgcacattgtcaatatcaacaccaaaactactcaaatgaactatttaaatgattgcatgacatcaactaatattacaaaagtttataataaaagaatctaatggctacaattacaaacaaataattcattgccttctggtatatattccttcatgcaaataacttacagttgcaatcaattatgaaatgacattttactcaattccaaaaatttctagacatttcccaaatattaatctttcatcatatgacagggtgctacaaacaatttttacacttccctggtctccaaaacttaccaaattgatcaaatttccaataaaaaaaattgaaccttggacattatgacctatgtgaaaaacacacttcattgtaggaaattgcctaggttaacaagccaccattggggagttctatacattaatgtattttttctattctatttagagaagtaatcttattctccttactcttgtatacagcttgctttctatttaaattctttcatcaaaaacaaaaagtctactagtgtttctgattcaaccctacaacccaaaaatattaagcaaacaacccttaactttaggcaatgcagacagtcacacagattacaaattggcaaagttgcaaccaaaaactaacctcagcaaacactgaaactatttttggaaggtactgattgtttgggcccaacagctcactgtcagacctgcagatcaacagacaattagtacagtggaaaaagatatgcctgacatcttgagcatatcagaagattggaaaagaagagtagggcccctaacctctcagccattgaacaaagttgatcatgcacaactttggcctcaatcaaatcaccttttattggcaaacagtttagccatgcaggaactacctgcaaacatgacagaacattacaaaaatattaactatcatctcaacctaaaaacaacaatcagactcagaaagaattgataataataatgacaaacataatcaagaaccaaaacacaaaagcaagttataaacagaattgacctgggcagaatcaatactgtcgcgatgaaattggcaaatttttcccaaagcggaaacagcattgtcatatgccattacattatctgaatgaagagcattaggatgctggatcacagcatttaacctcgaaagagcctctgcagtaagccaacaacaacttgttactcaatatagtacagctttttcatagtttgttaatggatcaagcagtatgataggaactggatcaggaaaacaggaaaatatggaatagcaggaacgtttattcacagtgaggcaatttgcctgaattacacagtaacaatggtgatttcgagacaccactctccactctctgtttctaactaactcccttcccttttctctatctatttataatatctatctctctcctactaactactgttagttagctactaacctccgtttcatttaacagctatcaactcttataacagagtcactactaactccccttctatgatacattttgccccatctattattattatatctatcaatacccccccccctttcaagagggaccttgtcctcaaggtctaattgaggaaacacaatactaatttcttctaaactctcccagctatcttcatgatgcggcaaccctttccatttaataagcacttcgtgttgaccctgtgctgtagtcctcttctgcataaccttctcagcttgcacctgaagttccaggtcttcagtcaaagcttgaggtaaaggttgaggctgacaagtaggtttaactgccttcttaagcaaggaaatatgaaatacaggatgaattttgctttccacaggtaactccagtttataagctacttcccccaccttctgaattatcttgtaaggcccataaaacctgggactcagcttctcattcggtttctttgccaatgacttcatcctgtatggttgcagcttcagaaacacccactccccctcttgaaattgcagctcccttctatgtttatctgcatatttcctcatttgnnnnnnnnnnnnnnnnnnnnnnnnnnnnnnnnnnnnnnnnnnnnnnnnnnnnnnnnnnnnnnnnnnnnnnnnnnnnnnnnnnnnnnnnnnnnnnnnnnnnnnnnnnnnnnnnnnnnnnnnnnnnnnnnnnnnnnnnnnnnnnnnnnnnnnnnnnnnnnnnnnnnnnnnnnnnnnnnnnnnnnnnnnnnnnnnnnnnnnnnnnnnnnnnnnnnnnnnnnnnnnnnnnnnnnnnnnnnnnnnnnnnnnnnnnnnnnnnnnnnnnnnnnnnnnnnnnnnnnnnnnnnnnnnnnnnnnnnnnnnnnnnnnnnnnnnnnnnnnnnnnnnnnnnnnnnnnnnnnnnnnnnnnnnnnnnnnnnnnnnnnnnnnnnnnnnnnnnnnnnnnnnnnnnnnnnnnnnnnnnnnnnnnnnnnnnnnnnnnnnnnnnnnnnnnnnnnnnnnnnnnnnnnnnnnnnnnnnnnnnnnnnnnnnnnnnnnnnnnnnnnnnnnnnnnnnnnnnnnnnnnnnnnnnnnnnnnnnnnnnnnnnnnnnnnnnnnnnnnnnnnnnnnnnnnnnnnnnnnnnnnnnnnnnnnnnnnnnnnnnnnnnnnnnnnnnnnnnnnnnnnnnnnnnnnnnnnnnnnnnnnnnnnnnnnnnnnnnnnnnnnnnnnnnnnnnnnnnnnnnnnnnnnnnnnnnnnnnnnnnnnnnnnnnnnnnnnnnnnnnnnnnnnnnnnnnnnnnnnnnnnnnnnnnnnnnnnnnnnnnnnnnnnnnnnnnnnnnnnnnnnnnnnnnnnnnnnnnnnnnnnnnnnnnnnnnnnnnnnnnnnnnnnnnnnnnnnnnnnnnnnnnnnnnnnnnnnnnnnnnnnnnnnnnnnnnnnnnnnnnnnnnnnnnnnnnnnnnnnnnnnnnnnnnnnnnnnnnnnnnnnnnnnnnnnnnnnnnnnnnnnnnnnnnnnnnnnnnnnnnnnnnnnnnnnnnnnnnnnnnnnnnnnnnnnnnnnnnnnnnnnnnnnnnnnnnnnnnnnnnnnnnnnnnnnnnnnnnnnnnnnnnnnnnnnnnnnnnnnnnnnnnnnnnnnnnnnnnnnnnnnnnnnnnnnnnnnnnnnnnnnnnnnnnnnnnnnnnnnnnnnnnnnnnnnnnnnnnnnnnnnnnnnnnnnnnnnnnnnnnnnnnnnnnnnnnnnnnnnnnnnnnnnnnnnnnnnnnnnnnnnnnnnnnnnnnnnnnnnnnnnnnnnnnnnnnnnnnnnnnnnnnnnnnnnnnnnnnnnnnnnnnnnnnnnnnnnnnnnnnnnnnnnnnnnnnnnnnnnnnnnnnnnnnnnnnnnnnnnnnnnnnnnnnnnnnnnnnnnnnnnnnnnnnnnnnnnnnnnnnnnnnnnnnnnnnnnnnnnnnnnnnnnnnnnnnnnnnnnnnnnnnnnnnnnnnnnnnnnnnnnnnnnnnnnnnnnnnnnnnnnnnnnnnnnnnnnnnnnnnnnnnnnnnnnnnnnnnnnnnnnnnnnnnnnnnnnnnnnnnnnnnnnnnnnnnnnnnnnnnnnnnnnnnnnnnnnnnnnnnnnnnnnnnnnnnnnnnnnnnnnnnnnnnnnnnnnnnnnnnnnnnnnnnnnnnnnnnnnnnnnnnnnnnnnnnnnnnnnnnnnnnnnnnnnnnnnnnnnnnnnnnnnnnnnnnnnnnnnnnnnnnnnnnnnnnnnnnnnnnnnnnnnnnnnnnnnnnnnnnnnnnnnnnnnnnnnnnnnnnnnnnnnnnnnnnnnnnnnnnnnnnnnnnnnnnnnnnnnnnnnnnnnnnnnnnnnnnnnnnnnnnnnnnnnnnnnnnnnnnnnnnnnnnnnnnnnnnnnnnnnnnnnnnnnnnnnnnnnnnnnnnnnnnnnnnnnnnnnnnnnnnnnnnnnnnnnnnnnnnnnnnnnnnnnnnnnnnnnnnnnnnnnnnnnnnnnnnnnnnnnnnnnnnnnnnnnnnnnnnnnnnnnnnnnnnnnnnnnnnnnnnnnnnnnnnnnnnnnnnnnnnnnnnnnnnnnnnnnnnnnnnnnnnnnnnnnnnnnnnnnnnnnnnnnnnnnnnnnnnnnnnnnnnnnnnnnnnnnnnnnnnnnnnnnnnnnnnnnnnnnnnnnnnnnnnnnnnnnnnnnnnnnnnnnnnnnnnnnnnnnnnnnnnnnnnnnnnnnnnnnnnnnnnnnnnnnnnnnnnnnnnnnnnnnnnnnnnnnnnnnnnnnnnnnnnnnnnnnnnnnnnnnnnnnnnnnnnnnnnnnnnnnnnnnnnnnnnnnnnnnnnnnnnnnnnnnnnnnnnnnnnnnnnnnnnnnnnnnnnnnnnnnnnnnnnnnnnnnnnnnnnnnnnnnnnnnnnnnnnnnnnnnnnnnnnnnnnnnnnnnnnnnnnnnnnnnnnnnnnnnnnnnnnnnnnnnnnnnnnnnnnnnnnnnnnnnnnnnnnnnnnnnnnnnnnnnnnnnnnnnnnnnnnnnnnnnnnnnnnnnnnnnnnnnnnnnnnnnnnnnnnnnnnnnnnnnnnnnnnnnnnnnnnnnnnnnnnnnnnnnnnnnnnnnnnnnnnnnnnnnnnnnnnnnnnnnnnnnnnnnnnnnnnnnnnnnnnnnnnnnnnnnnnnnnnnnnnnnnnnnnnnnnnnnnnnnnnnnnnnnnnnnnnnnnnnnnnnnnnnnnnnnnnnnnnnnnnnnnnnnnnnnnnnnnnnnnnnnnnnnnnnnnnnnnnnnnnnnnnnnnnnnnnnnnnnnnnnnnnnnnnnnnnnnnnnnnnnnnnnnnnnnnnnnnnnnnnnnnnnnnnnnnnnnnnnnnnnnnnnnnnnnnnnnnnnnnnnnnnnnnnnnnnnnnnnnnnnnnnnnnnnnnnnnnnnnnnnnnnnnnnnnnnnnnnnnnnnnnnnnnnnnnnnnnnnnnnnnnnnnnnnnnnnnnnnnnnnnnnnnnnnnnnnnnnnnnnnnnnnnnnnnnnnnnnnnnnnnnnnnnnnnnnnnnnnnnnnnnnnnnnnnnnnnnnnnnnnnnnnnnnnnnnnnnnnnnnnnnnnnnnnnnnnnnnnnnnnnnnnnnnnnnnnnnnnnnnnnnnnnnnnnnnnnnnnnnnnnnnnnnnnnnnnnnnnnnnnnnnnnnnnnnnnnnnnnnnnnnnnnnnnnntccaatcgcatctccagcgtttcgcgattcgcctctaaggctctctctatcgcgtccactcgagcttccattttcgcacttcccttcgccaccattaatgtccacagctccaagatcggagctctgataccagttgataggaactggatcaggaaaacaggaaaatatggaatagcaggaacgtttattcacagtgaggcaatttgcctgaattacacagtaacaatggtgatttcgagacaccactctccactctctgtttctaactaactcccttcccttttctctatctatttataatatctatctctctcctactaactactgttagttagctactaacctccgtttcatttaacagctatcaactcttataacagagtcactactaactccccttctatgatacattttgccccatctattattattatatctatcacagtacctccaacaagatgtttgaacacagatccaccaaactctgcacaaacaccgagaccatacacagctgcctgcagaaatatgaagcaataccaacatcaacaatcaaacagcttaaaagttaaaactaaactatcataccccagtgcccaaagactcctcactaagcaaagatatgggagagggtaattgtatgcatttccggattcaaacccatgaccaatcggtcaccaagacacaactttactgttgtgtcagggcttgcgctctaacaatcaaacagcttacgcaataaaaatggtattcaaaatgttaacagaggatacctaatgcttacctgtctgacgtcaggagtttcatcattacaagcctccaacaggaatgggagataggtatcataatacctgttcaattggtatataaaagaatgaagttgataaaatgccttcataattatcactgcacaaaaaaatggtaacctagcaaaacaaagagtgcttacttaatagcagcttcacgacactgctctgcaacatcatcaaaaatacaaattgcaattcttctctcttctggagtcttgtcccttccctatatccaaaacattaaaccaagagtcaaaacaatgatgtacatgttttaggctgtgtttggtaccacatcagaaagccaaaaagtgcatctgatatgtgaaaaccataagctctaaatactaacttctatgttggacacgagaatcaacgtgtgtactatggtctaaactaacgtgcaaccaaacattagttctttgaaaattgagtttaaaactaatcagcaggcacaacttgtaagaaatctgctgacataacataatatagaccactcaaattgcagaacagaacatggttaaagtcaatctcacagtttaaacatggtagaatgatacatttcatcggaaaaaaaatcttgcaagctaatgtgcattggagaatgaaaatgaatgtgaactccaagatgacaagtgtaataaaatagtgtaaactggtaagatgatgatagatgtgaagatcagaattagaagtcaaacatagatctatgcaagtatgtggcttgcaagtttatctctaaatgactaaatctatagttaatgttgcacgcaaacacagtaatctttcacacttttgaaaaggcacgagttcaaaattagcaatactgcacagattctacattttgaaatcatatttaaaatttactaggtaaactgagaaaacagaaaaatttagacataattacaccaaaacaaaatacaaaagataatgcttaaaggccagctgaatgaataaatggaaatagaaaaactaattaataatagagttgctagctttctcaaagaacatacccacataggtgtcagatatgatgatagttcatcaaagaagggtaagaaggaggctttgaaggttttgatcaaagttcccaatatctcacccacctgggacaatgtatacatacattagaaggaagaccaggaaactgatctgcataaacttaaaaatacaaagatagtagtccagtacttaagatgtttcaaattatttttagattaaacaactaacttgatcaaaaacttcctcctcttgttcattttcctctttaatcagttccccctcttcatcatcaaaatcttcagcttgggtcctctctgctctctctcgttttctacttgaactagctgtgatcacctgttttatctcatccacgatggatctgacctggctttcatccaaaagcatcccagagatctaaaagaggaagaaaaaaaggattggaacacatccaaaacatatttatagtgcaccataggcactcaagggaaagataaaaaaagacagacaaaaaacaagaaaagggtcgatcattacccaagcatcacaggaacaactactaaacactcatgcacaataaacaaaagcacacattgtgaaattgaagaatataaaccacaaccaagcatcctctgttaattatatataaaccattggcctctaaatcttaatagttttgcctataatatttctcagtcgcactctagctccagtggtaggactaattgacatcttaccaagctctccttactagggcctcctagagaaattatataaagtgacatcataaaaggctgtgccaaagtaaataaacatatgcagtcaccttcacaggaaggcacaccaattttttgcatggcatacctcactctaatactgcaaaatctacatctacattagtataaagtaatgtgcacctagtgtcacctttaatgaggcaggcagttgctaagtgcaaaagacaaatttcgtaattaagtcaactaaacaataatttaaatcctcaacatgccaatcatgaaaagggaaatatttaaactgtaaaatgtagtttttatttgccaattgatcacaaaacctagcagggatagacatcagttagaagaataaataatagcagagtcagtgaggctcttgattgaattctaataatgataagcatcaaacttcaaattataatatataacatcaactatgccaaggtatattcaacactcatggctctatataataaagaaaagaaatttatccagaaaaaaaaaaaaaaagacaaaatatatgacaatgttatctcatgatccaaacctgtaagcattcatttaatgaatccaacatgcttgcacaaatctctgtgtcaggttcctgcaagtaaacagaaatgggaaaatctcagcaaagaaataccaagggccactgacaagtcaggcaacattcaccaccaatatcacctagagtaatcttagtcctcaaacccatgccagaaccgggtctcctaaactaacaaaaaataacatgctgcactcacaaaggattgctttggtttatatgaatattcagaacttaaaatattttcaagacaatttcaaatcaaaaaataaaaaatattcacttccaaaatccaaaaatagaaacttcataacaacacaactaggaatggataaacttgaatatcaatttaccttgtgcaatgcttccaccagagctgggatgatactgtcagtcaaaaatttcaaataggttacatcccggccatgagattgccccttctcgatagctaatttcgcagatcgtaatagctccggcattgctgtagcaatattggaaatgataaacattaaaacagatagagtaatgatataaaacacatttactgtgcaaggaaaaatcatcgaccaaaaaaggatgcaaagcaacaataatttttcatacctgaaacagctgctttcctaacttcctcatggaaataaaatttaaggagtggaactaaagttccagcaacctgcgttgcatacaaattattaacaaggaaaaatatgtaaagaaacacttaaacaagcattaatgtgtaaagggagtcaatgaaggcctaagtctaacctgatcaatccatggaaagaatccttccttcagctcatcagcatagcaacaaagcatgttacatgctgtagctttttcctctagaacactagtcttgattccaattcgtttgtctccaagagtaatagtctccatactgcaatggataaataaaacttaattatatctgtcctgcctaaaaaaaaaatgttttgatgcgtgcttctaattctccataagaatgaaatcgctattagtaaataagaatgtgttagggttttgtgtgtgcgcaattacacaagtggatgtcataatataaagataagtaaagcaataaatgcaccttaactcctaaggcttaaagtcactattagtgaacatacaagaccaaaatgacaagcgatgtgtgataaaagcgatacattatgcattcataatttggtaattgtttaaacttttacgtagaaaagggactaaagttgagacctttcatcatcagaatcctcaatctcattgtctgaatctgctgatgtaatggttacatcaggcttaagtgaagcagattgaagcagtggaggcatgacaaattccatgtaaggaagaaaatcttgtcccagacatttgcagagtctagcccatgcctgtaacaaattaaagttgttagactaaaacatagaccaattggcagtttatgcatatgttgtaaataatatataaaaagcatacctgtagcatgtaacttgttgttggatcatctgtctccatttgagatacttgaagggacataagaacttccataacctagtgaagaaccagcacacagaatattaaaatcataagacatagctaaccagagagagaaagaagtgcttaacagagatgcaggggcagttaacttcctattttcctgttctagaccgactatttttccaaatgatgataaagtggtataaaaggtgaacatataaacaaaaccatacataatacattcttgtttggcaaagtaaaaaaataaacaagaaacacctacctgcttcgcatcagccctaaacttctccttcccaacagccattccaactaaacttatacactccatggacttagcacgaagcatacggttagatttgtcggttgcattaaccaatatagccttcaggtatggcattacagcatcataatatttttggaagtgttcctaagaaagaccataataattaaatgagtgatcaaaagaaaataaattataaatgttgattgaacaaagaagttaacaaaatacctgagaagaatcagcaactgatgccaaagcagttaaggcaccttcttgcaccatctgcttaccattctgaaaaatgtatagaaaatccaaaattaattgaaggaagaattacgataatttagcaaaatgaccatcataacattattcttgagattaattctcaataaatatacctgaagaagtacaagtagtttgctaactatcccatccaagtatggcgttaagatatcaggtgtgcagttctcgctgaagttgagaactgctgaagcagcatgtgcctgtgtagacaatattttgagaataattacaccagatagcttatttaattaaaatagcatgacttcaattataaatcataatgactatataagaataaaagaataaatgaaacacacttcataaaattgaagtatatcacaatgcttcacatttgtataataaagtaacattgcagttactgtttgcattgtattttaaataattggcatctttaatgagatgcaaagttcattaaaagaatcacaagactttcaatgcatgttcaagaataaagaatatcacttcaataaaggggcagctaacctgcacacgagggttctgaaaatcatccatggcaccagctagtgctggcaacactccttgatgatatttaacttgcaaatcaggacccaaatcagtagacagctgcccaattgcattaatagctgcccatcttacacgggggtgttggtcagggaaggagttcaggaccatagccaccacttgctccaaattctttatcatgacctgcagcaattaaaagttggtagaaagtcaaaatcacaagtggtacacacaagttattgcccaacaagaaacaaccaatcacaatcatatcaactataactaacacaaatattctaactgccatttacttgtataaaagcaaaaatccacaagaatagttgacatctccgatcaatataatacctttgaacagccctcagcaatctgagcaagtgcaataagtgcagcatgccgtttctgccattctggagcagccaagtaagcaggcaactgttcggacgcaacaggaacaatggtgtttccacccaaagatatagagagcctatccaagcactcttgtcccacgctataattactggtttcaccagcatcctcatcctcagtctcagcactgtgccacgcaggatcatcctcaatatcaagaagcatcttcatgagtatcgcaaacaacctactaataaactgcggcaacttcctcatcatcccgggggcacgctccctcgcctccgcgagagtaatcacaaactcaatcgccaaatgccgagtcccttcctcaagggattcagcctcggcaatctgcaacatggcgccaacgacatccacaagctggcgccggagaaaacgcggctcagtcccggcgagctcgatgagaagctcaagcgcctcctgggcggtggcctcctggccggaattaagcgcctcggtcaacgtccgcatcattgcgggcagcaggtcctggaaccggtcgcgatcggcggaaccggacaaacactggatgaaattgataacggcgttaagcgcggcaattcggacgtcagggttaacggaagcgttcgtgaggcactgcaagaaaatatcgtggaggtgcttgatgtgaggagtgagggaatcgccgatgtactgcgacaactgcgcgaagattaaaaacgcggattcctgaagcttaggggaatcagaggaaacacactggaacatgaaaggaagaagctccggccaggcgttgtcgggtaaaataccggaggcgagttcggagatggtgtcgcagagcttcttggagatggatttgatgttttccgtttgaatcgaggagagaaggagcgatttgagagaagactgcgtgtgaggggagaggcgcggccagaggtaggagtcgtcgcgcgtgagctgtttacggaggaggatggcggacatggcacgcgcctcctggtgcggcgaggagtggaggaggtgtgccagcttcaaggagaggttatcgggttcggtttgcttgcataggttaaacagcgcctccgcgtgggagcgttgctcgttggaggaggacatgaggtgcgagatcaacgtctcaaagggggagggatcggcgccgaggatggcggcgacctgcgattgctgcacctcagaatccatggcggccacgataaagaagaagaagatgagagagcaatgacgagtgagcacgcgcgggttagggtttttgatttatgattatgtgattagagagactagactcgcgtcgccactcttctctctcggggtgtgtgtgtcgttttatatatactgttgcgggtgttggagcgagcgagggagtgttgtgttgtgtgagttgtggtttattgtcataatatataagtgggaaaagggttaggttaccgtgctcagcgagtgggactaattagggcaaccacatgatttttattagctgtgttttgttttttaggtcacggttcatcattagcctacgctttccttacttctttttccccccttgtggcttaattaaattaaatttatgtatgtgaaaatttttgggactctttggggatcaatttaaaatgcgtgtatgattgtttctttttagttaattaattaatggaactatttagaagattaatgtagattttaagttttttctttttattttaaattttgtgtacgaaattcttttttgaagaataaaatggtgagaaatataaaaatacgtaccagtaaaactatctagcatgtgacaaaaaaaataaaatcatccagcatacaaatatcttatctagttctatcggatatgctatataagacccagtcagtaccnnnnnnnnnnnnnnnnnnnnnnnnnnnnnnnnnnnnnnnnnnnnnnnnnnnnnnnnnnnnnnnnnnaaagtttttttttttttttgtgtgtgtttttgagtttgttcctaccctgtattcacactattattttaaatgaaatgatataagcattttaatgtgagaaataagatttttaaaatatatatatagaactaatttatatttttataaattttaaaattaatttaatatttttttgaaattaatttactaatttattacaacagcaacggcaacaaaccttattgaatgagtttataggaatttttaaattttatttcaataaatgtgatataaaaaaattcaataagaaaaattaaggttagaacttagaagttgtctatccaaaacatcaaaatgagtaatctgacttttcagcggatcaagcttaggtttatagggattaatcttatcgtatcatatatccttaattaattcccaaagataagatataatcatatgtgacaagaaagcattactagataagggaataaatatggattataaaaataaaaaatacaacgatttttaaatttaatcaaaatttatattatttttaagattctaattattttataaagccgaaacaaatgcataaaaatttaaaagaataagtgattattttataaaaatatgacactaacaatataaaaagttttaataaactgtagtacttactcacgaggttttatgaaattatacgatttttttttgttttttattcctacactatattcttaattgattgaaaaatatagatgtatattattagtatatattatttactctaatttatatattaaaaatatttatttacttattatgaactctaatgataatataatttatatcttaaaagtatttatttatgtaacatataaaataaaattctgttttttttttaaaggaaaggggtcggaacccactctcaccctcaccccacttccgccagcctcttcaaagtctaaaaagtaatgcatctaaaactgtggaaaaagacggtgtttttgtaaatactatgattactcaaggtaaataattttttaatattaacaacgtatattttttccttaattcatgtttgaagagaaattaccgttaaataacaaacacgaagtcgaatctatacaaacaagcacgagagttacagtccaatacatgctactgcttgcaaccttttcatcggcataatttgttccaagagatggttaatcacaataattgttgtctttaataattgaggctttgggtcacaaggacttttccccctcgtcttttatcttttccctttatttcgggtcgtagggtctttcttttctatttttttaacactgtcttttcaaactaagctacgtgcatacatacgaaatttcagaataatttgagttatttaaaaaaaattaacaaaaaaaaaagtgctaagatgaaaataaaggcggtaaagtttgatacaaggaagtaaagttacaagtgattgacccgtaacataaaatttcatcttttccgtttcaagaaaaaaaatccatgatttttatttttattttaaagtactattttattcggattcatatatcgacgtgttaaatgatatgacattaatatatatatatatgttagtcattttcatcaaccttaatacaaaaaatacggacactactcatttagcagttgaatgattaggtttataagttattgatatatgtttaaattctaatgataatattattacgagttatctacaagttattatgttgttaggtaatagtttatcaagtggctacgaattatctataagtgattgtattgttaggtaattgcttatcaagtgacaattaactatctatagagttgttatgttgttataacaatcccgacaattaagggtattaagctcccgtttgacactataaataatcaagttctaccttcacttttcatttattttcaactcattcacttacttacttgaatgtcgaaatctttttcgcaggtactccactcacgttcctctggtggaggacacatgcaaattcgacataggagatcatggagcccaatttgacgaaaatcaactctaacgtcaatttgctatagattttggtaagtacatttgttgcccaacatggggtcgcagtaaaacttcccctgcaaccacccacattcatggttagcacacgcttcgaccttcggtaagagccactcctagaaaattccaatcctcctccaacgacaacgacagacaatgatgctctccatcaacttcaagcctgcatcgcaaagatggaacgtcgccatgaggaggaactcataaaattgaaggtcgaccatgacaagttggaggctcgtgtgagatgccctcaaaaggacaaacactcctcccacacggtcaatgagcgcacccagggcgaatcgcatcctcatgagaccaacaataccctggatgacaacaacaggtgtccttggtcgaatctccaaacgctcgtcaaaccccaaggtccacccttgatgagtctcgtcaaacctaggacgaacgcgtccctagtcaaatctcccaaggcttgtcaaaatcaaggttcgtccttggtgggtcttgtcacaccaaggacgaacgcgtccttaatcgaatctctaaaggctcatcaaactcaaggtccgcccttggtgaatcttgccacacacaggacgaacacatccctaatcgaatctcaaaggctagacaaactcaaggtccacccttaatgagcctctttgctactaagtttcatgtttcacatgcacccaagacacactcttggtaaacttattcccttgaaaccataacaggcatagtcaaagttcagattaaacacttgttagtgtaactcaagtaagtccccacggccttgggtaagaagctttgtaaagtgaaaaggaagcgtcatcgggttgaacctaacccaagatgattggacaagaccttcaaccagattgaaatcaaacccgagatgatcagatgtcatctcattctctattccatacagacatgccatgtaagaaaaatcgcacctagcgcaaaggaccactctcattattctacgacaagtattaaaggctaaacattaagggaaacacaacctagacattggcctcatcgtcttcctcgccatcaacaatctcttcctcgtcgagaagttgacagacctttacatctttaaacgggtcaaaaagacataggtcaagaccctcagtgaagaacctggcctgcctgatggccttgaagaatccctttttgtgctgctccacaacctccttttcgaacatgagaagtttctcctctagctccttattcgcctatttctcctttgtcgcctcaagctcagactccttcaacctagtttgtaggctggatacagtgagcttcgactcttttagttaggcttagagatcagcaatcaccttgacagattcatctactgtcgtgtgaagtttctccttctcttaaacggagcgctccaccttgctcgtcaagtcattcttttccaataactctttatgacattcgaacacctcgtcaccatccagtcttatgctcaccagcttagcaaagacatcgttgaccctggatgacaactggtagttagacctaacggcttcagcaagggcgacagtagcattggccactatgagtcgttccactcgctactcagttcgagcattgactctccatttggtgaccttagcctccaaggaagaaatcctactcagggcctacttgtgcctttgctccttttcctccaatatagccaggctcctttgaagaaaaacctttgcaacattgattgagtttgcaccccaactaatcgaataagattttgatcaaaaggagaaacaaagtcaacaactatcctttgctcaagtctaaagcccatactccaaagagaattcgcatgtcgagaactatacacatgatccaatgaagcgtttatcttcaaagcgctttctaacggttagaattgtcaaaaacaggagcttctctcataagaacaccagattctacctgaagggacgaaaaacacactcaccttagacaatctatcaattttaacccggacactgtttgtccaagctggggggcttaacaaaccctcaacccctaaatttgtcgaggttaccaccattgacattgaacaacctatttcgccaacaagtttgacttagagctcgggggcttttgtattgtccgtgtccacaaattgacgtgacaagtgcatgacattaaaatatacatgccaacacccttcgtcagccctagtacaggagcaccgacactacttgcttaggagtcaggtgattgagttgataaactattgatataagtttgaattctaatgttaatgttattatcttttttttttatgaattatctataagctgttatgctcttaggtaaccgcttatcaaatgactatgaattatctataagttgttgtgttgttaggtaatcacttatcaattggctatgaattatctatagagttatgttgttataacaaccccaacaatcaagggcttaaggctccatccgacactataaataatccaattctaccttcattttatccattctcagctcactcaatacttacttgagcgtcaaaatcccttgtactcccctctcattcctctggtaaagggcatctacaaatccaacctaagaaatcatggagttcaacttgacgatagtcaaccctaacatcaatctgctccaaattttgataagcacatatacaaaaaataattctttaaacaattttttttatacaaaaacattatttttcacttatttcttttaaaataaataaataacattattttatttatatattttttttctatttctcatctatcgcatttctcttttctaaacaaaagaagccccttacatgttaaaactaaataattgttgacttcttacttgtttcactcgtttggcgtccacatctttacttgtttcactccattttttaatccttgctttcttttttctctatcgtgagtggttttcatcgacatgcacattccttctctttgattctcatttcttctccttcttcccaactcttatgcccccaggaaacttattttgtaagcatgggagtgatcgggaatattcgccaactccctaaaaacttgcttcaatattgttgacttctgtgcatattgatcaaaagctactgcatgatactggcagtttaaaggtctgttatatattgttttgttttgaatttcatgatgtacgtatgattgatataacttttttttttggaaactacgtgtttcattcatttttgtcactcggtattttgtttgcaattgtatgaaaataattagagatctaagagcatatacaagaaaaatgccgttcttcaagtttaaggtcaatgcgtagtttaatagtattacacttattttcagacatgtctatttatctacacatatgtctatcatattaagcgataacatggttaatattcttgcaggcatgcatctaattaaaccatcttgggtacgactgaaatcattttctaaccaccaaaggatgaagggatttttcatttactaatcacaacttattaaattatgtttttcagtatcaaagggtaaaaaagagtcgagccaagcaactaataaagtgaaggagttagagtttttaaggagttggaactttctttaacatttgtgtaagatttgcccgtggattctgaggcaagatatattttttttaatctccatatcatcttaatacgtttttaaatttttttaaatcgataagcagcaataaaccattttttaggacgattttaacaggattgatatttattagttaaaattactcattttttaattttaattttttttaaatatttgttaattttaaaattgattttgattgtaaaactgtgcaggtcgcctcataattctttatttactttttttaacaaagacaaattttttggtggtttagactgaaaattcaatggactttatttcacacggttacaatttcttggtggcttgttcttctatgatatagatagggatgacaatatgggttgggctcgacgggccagcccgtttagccagccaaaaaaggtgaatcggattgaaaatttcagcccattttggaaaatggggcgagccaacccggcccacaaaaaggtgggccaaaggcgggccaactcgacccgcaaaaaatgggctagaggcgggccagcccattttacacttttttgcttttttttggcttttttcttttaaaaaattttttaaaatttttttttggtgggctggcgggctggcctattagtccgccaagccaccttaaaatgggtcgggctaggattttcagcccactttctaaaagtaggccagtccaacccatttttggcgggccagcccatattgccatccatagatatagatcatattttgtactgaaaaatattggttttctcaatgagtggtatttctccctttgctctatatgttagtaaagtatcatttttgtgtagatatatgttttgtttgtaatgactaatatagactgtatgtttaactataggtcatgagcaagattgatgcatggaattttgcttaccttcttcggtgacccattgatcctgtgaactataattagcattggaaaaaggaagctaaaaacgagatagagaaaggaaaaaatgcaactaccacaggttgtaatttttctataaatttttgtataaattcaatatcaataatccatacggggtgtgccgaatcaacgtccaagtccgttttcttagttaagcaccttggaagaaatgaatgtttcgccaccttcgttttagaggaacagcgccccatgtgcttctgactgaactaattccttctttttgtcgggggttttcgcagaattgggttcgactcccatagtcccgcggcattccccctgcggatcgggtgctccgggactcagagcgtctttgactcttggtttttgggctttgccctctctccaaataaaaaatcagtcacttataaactgaattctaagttctaaatataattatatagtgaaaaaggagcagaagatccaatctaaaccagaatgagctttagctctgaatctcaatcttctggagatgtctattttagtacgataaaacttaatttgtatattcattttcatgcgtatagaacttgtatatgtattctttgaatttaattatatggtactatatcaatatttacttgctctcccttagtctccttggaagttgaatatatattagtattacattacattgatactttacataanttttttttttttttttttatggagaaaaaagaatatattgcaagtgcccaatagtgtaattcgtaagtgatgctaagagaaaaccaaaatacccctttaataacaaactgtttataatcgaaaaccaaaaattggcaattaccttgaccttagtttccaaactttagaaaacacaaatttttatccctcctaaaattttcatggcaaggaaaaaaaaagtcactgtgtttcttttttagatttcaggaccaaattaataaaagttgaagtttcagaagtaaaacatattttatccttttaaaatcagatactaattaaaaataaaatatctaataaaataaagaatttattttaataaaagcaattattttaacaaacatttgaataaaatcagatactaagtttcaggggagtttgtttaaacgtattctaaaaaaacaattatttaataaaataaagaatttattttaataaaatgaaatagtgtgtttgtggatggatttgtttaaatttaaaaatatctagaagtggctggttgaaccagctagttacgaagcagcaaatatatatagacacacttaggttcatcactcattgaccgtgccgacgttgaaaccgcgattgaaccgcttccggttctcggagaacgggagagtagctgcctagctgctagctgcacgaatcgattagtgattgtgaagatgcggagagacaacggtgatagctaagataggtatttaattaccattgcatattcaactcttataattttcttcttcgttcataatgaattattctcctacgttcgcagcagaggacatgcttaataggttaagcagacgctgcttttgcaccgttgctccacgcccttggctttttgtggggttgggcaaccctggcgacaagttcaaaggaaccaggcacaatgtacttttccttttacttctgcttctgcttctatttgcagtttgtttcaagtttttgttatcaacatcaaattgcatagaaagtgttctgtagtgtaaagggggtatagttagttttgaattagcagttttgtggtgaaatatgaaaatatgttttttttttttttggtctgaattaggttggctttgagatgattgatgcatttgctgagtcacaggggattcctatggacactgtccattccaaagccatttctggaaaaggtttatctgctgttctctgtttctcttttgatgtttcttgtaattcatgaattttattaggcaaggtggtggtttgttacaggttttgttggtgaagttcctgtttttcttgcaaagcctcaaacttacatgaatctcagtggtgaatcggtaaggaattaagatgtgctgccttttgttttttctctcaaccatctagatattttgctttagtttctacaagttgtttcatctagatacgttttggtcattttgaagaattgtagttgccttagtgtgttttggggttattttagtattagattatcccttttgttgcaggtgtttttgtgcatggaatttcctgggagagtcttggggcagttgtgatggttaagttttctgtgttttctccgtagttttttgtggtttcttataggggattttactttgtgttccttcatctctgtgaattgacttatgtttttttttttggaaaatcttttcatacatgatagagtaaggttatagtcattgtggaaaggagtatcattcagattagagaataatgaagggaataagaaaatgctgggaagtagggaaacatagcttcttacaaatctcctgtggattaataattctttggtcagatagaggtccttattgaatgctattaatccccttcccctttttcatacaaaaccaaggagaagaggattgaaagatggccatcatgaccatggctgattggttcatctttcatttctgcttttactggttttatactaatatggattccatggcaggtttctgtgtttgtggtagcacgcaaatggtttcatttacttgtttgttgatgtttagcttacatataaagcctcaggcttattatcaatatatgttttactgcagacaggaccaatggctgcttattataagctacctcttaatcaggtgcttgtggtgagttattccatatcgtaccttttcttttaagtatctaatcagtgataggtgtgcgctgtttctttatttaatcatgtattttttgttgcagttccatgatgacatgaacttgccttgtggggtgcttcgtcttcatgacaaagggggtcatggaagccacaaagggtacaacattaaatgataattgtgaagcaaaattactattatttccatccttaagtttttttttactctgatcataagaaacttgttgctaattcaagtgcctactcctctaaactctataaagatttatggtgtttattacgcataattagattgtgtaattcactaattccagaacccaataagtatctgtcttgaacttaacatgtagatgttattggagtcctattccaataaccaacattttggaagtttattctaccttttgttataataagaagatgaggacagactaagaagatgtaataagccaaattagttaacattgtgagagtcctgattaggttgtatattggtttgtggtttgagggaaaaaattccattacttataaacgtttccccctcaatcatacattgattggaactagatatagattggaaaaaaataaaagaactgatatatattgaaggatccccttacaaccaacagagtaatcttctgttacagtatattagcagaaagcaagaaactacaggaaacaaatgacaatgaatggagcaagctccttacaatatggcaaataggaattaggataaaaaagaaatggtaacacccagtgactgataaatgataagttcctctgctcagactaacaaaccccaacataacccttcggaaattctctcattccttctatttggttgcaccttcctttaaataatcattctctctctacttgcctgattctctgcttcctgcattccctcctccattctcaatgccacctgtttattctgttattccccctctctccttccaatccctcgtgtcacatttttcattttttccttctctcatatatacccacaggccttgattttcgggcccactttccttttccttcaccttcttagttcttatatacaccagcctcctgtaagttttatgcccgtgcctaattcttaaaagcttgttccagtccatctggaattaaaaaacagtttttcctgacatttattgttgctatccaattgcttattgaaactatgggaaatgccttctttgcccatttaaagtaggtttaattatcaatttggtccccaaatttttaaaaggttcaatttggttctcaagtttttaaaaattaatcaatttggtctccaaattattttaaatggttcaatttgatcctcaagatcttaaaaatttgagaaccaaattgattcatttttaagaatttgaggaccaaattgattcatttttaagaatttgaggaccaaattgattcatttttaagaacttgaggactaaattaaatcttttaaaaatttagggaccaacttgattcattttttattgaagaccatattgaaccttttagaaatttgaggaccaaattgataattaagcctttaaagtattgaaaaaactaatgattgcaatattatagattatttcaattctattatggacccgtgcggagttatccatgactccaattgtggttgtttggaatttaaatggttagaaaaaatgcataccagcgagagtttatatcaagaaccctgttactcaaagaaatgctctcaatagttgatggttatctttcagtaaatgaacatctattagtactttgtatggaaacttaatcatatagtcattcttcatagtttttctttatctattcatggtggatatatagcttcacaattattcactacattttcacttttcaaggggccatatattgtcatatctgtgatgcttcactgttttaggtaaaaaggaaagtaatttttatgaagtggctgaaaaagccttgtttaatttagaaataagaatacacaaattgaaagaattactttcaattcaaatgaagaaaaaagttgtttcgaaagcatatcaattgctaagattcgaagaaaaaattattactttatatgaatacactaaggatcactatgagcgtgtttataattcaataatattttttataagtggtgatagtctgatggaaaatgagttcatgaaatctttttagctctgatattttcttgttaagtgcttctcgaataccactactcatcttgtacatggtcctcacttctcactgaaccaggctgaagagtgtgatctatcacttcagaggaaatagagaatttcctaggctgagaattggttggtacttatgttgcaaatcctttattctttccctagtttagattattgatgtaatccttattttcaatttgctttgtcattagggattgggagtcctcctgggcaaatggatcctaaagcatttttgcttcaaaagtttaatgtaacagctaggcaacgagtaagttcttcatttactgttaaattcacttttggagttttggttcctcgtgtaatgaaagtttcaatttggttccaatggttcaaattgcagttcaaatataatgggaaaaatgagtggcattgtggtgatgtggtgccaagaggggatggtgtgtggcttcgctatggggtgtgaaaaaatgtcaaatatgattgcagttacttgtctcgttagtgcaatgtcataaatatatgctaatagtcccatttgagaatgaatatactgaactagaaaattcaagggcaaggtttttgcaatggagccatagttattaataccatgagatatgtgtagaggcaataagcaccaccatgaagaggcacactaccccacttctatattatagcaaatatttttacattgggctacatgcactatattgaaaactggccaagtcaataaaaaaatctttatctcagtgatgcttcttgttttttcttgttggacagattgatgaggctttgcaagagggggttgatgtcttgaagctccttttatctaaaggtttggcagtgagtgcaaaaagattcaacaaagaacaaaagtataagcacttaagagtgcagaatttaccagtttgataggattccgtgatggaaagttgcattataagtctgattagttcttcgctttataggttgcaatacgtgtaaaacttaagcgataggaaattggcttaattttgtaacattccagagatagatataacttttaaaatggtttatgaccaacttttttccatcttgatttgttttaatttggatactgtgtctgtaatgtgcattttgcaccgagtgcacaagggtgggataactgatcacgcattaaagtattggtaaattgtgtatagtgtataaacttggtgaaaggggcatctttcaaagtagcatgtaccttttcccgccgagggaaattgttattgataatcgtaatcggagatgcgttatatggtatgaatcatagagtagatagggaaatgtgatatgcagttaaatggggataattcctcaaaatttaatccaagatattcgacttgggtgtaactagaaaatgaagatcagggacttaaattatactttatttcactagctatgtatgtgtcttgatatggatgttagttaggcggtacaaatacctggataaggacaggaaaataaagtatttagaggattgatcatctatcagcattatacttgagttttaaagccatgggccggtgttaaataatttggttggtaaaccatcactcatgctacttgatttattagttgtctttaactaatttcttgtgattctttttatcttgacttttggaagccatttcaggcctgaacattttgtcttgagctaagtttgatttttagtttgattttttatatatttgatttgatgcttgccgtagctaattcaaatttaaaataataaactatacggctaaagattatatgaatttattatcatatgaaataacaataaatatatttaatcacagttaatttttaacaaactgaatattcactaaaattgaactttgcgtccctaaaattcgatccaatcggtttcataagctccatgttttgtttatcacgctgcataacgttatgggccgaataagatattaaaggatttacagtagccagctgttctaagatccaaccatcatgctggaaaattcagaaattcaacaatgtgacgagtagaaaatttccatgtgctccacgtcctaaaggtaccttataaaaaaaataattgacagatttgattttccgtagtaccatatgttttaggattcctcatatttattgtagttatgtttaggattcctcagcagtaatggttcatttatgatgaaatactatagccacaggcaaaataaatgagtacccaccatcattttaaaaaaataaacagatggcataacatgttttatgagatacaacgtgcagatcctttagccattttgtactttttctttggttcttttcaaaagaaaattttatgttgtttgatttattttatatcttcattttcaacattgttactagtaactataaaaatgccatcttatttttattgtgtatattttcaaatattttattttcatcattttccccacaaaatcataaagttaatgtgatttttttataactatcaatgaaaacatatatagcaacagaaaatgaagacaacaaataaatcaaacactacttcgaacttgtttcatttaaggaaatattttttccattctctaataaatattaaaaatatcactattttatttaaaaaaataaaaaaaatggtgaaatcaacactaaaaagtaagaacaatcaaaccaaacaccaatattttgagtaaaaatgatcacatggaatccattatggggtgatgagaatacgaaaaatattagttttgattgaaacaactaactcgcgtcattgtattgtcaagctgtgtatgttgatccagcccatgcagtcatgaaagcctaattaatgcctagtgttgtccgatagcaaattggggacggtacagatggtaggtggtttcttttgtgcatgaatcatatatatacatatatgccagcttgttcatttggtgtggtttatttatagttgaccctatctcgtgacttgtgagttttttagcctttaggctctagcgcaaatcacttcctaaatcctagctccttgtgattttctaacaaccttttcgagaaaattacaatttataattgttaaacaattaactcgttttgggatctaggattaaagtaatgttatagtttggtcaaagctttatagctctttggtggcattgggcttggttacaaatagctcattacattactacaagcaaatgctataaaggatcacatgctgcctgcaatattaatctagtgaggaaattatctgttgatcacctacgaccatttatttaacatttgatttgttatacattcatagtttaattataaacatgaattaatgttgaattattctgaatagcattttttttctttcactttaatttggagagcatcacaaacacggttatatatgtaactcgggattttggaccattcgttaattagagttacaaatatcattggacaattattgacgaacatataattggctcaatgtttatttaattcaaccactgacatagtgacatgtttctgcttgctttagctgtaggtgtttgcaaaatcatataacctgctccttgatttgctatttcgcctccacgcatgacttacacgatcaacaagcatgcatggcgtgctacattattaatttcatgtcttatttttttcgttgatcgtgtccttttatgacgttaaatctaatctaatctaattattaaattttaagtacttacatagataatttgattaagcaataattcttatgctcttaatttccttttatgtcacatacatatgttctgttcctctcccacacacagaaattccatacatggaattaattgcatagcactgttgcaacttgaaatttgccaaatagcaagcagcatcacatgttgatttctacttctacatgtcaatcatcgaaagcaccttattatacaaggtcacacacactaaggcacgcgctatgtgaaaatacttgatcattaagtaacttgtaattatttaactagtggttgaccttaaatttttgcactaaacacttgtcaactccactctcaaacaaatgggagaaaaatacaaagaagtttatgtataaacgtgtatatatatctcactatatatgccagtatcataatcagtgatctagatccttatttctagctgtgacacacagatcagaccaaacacaagtcaaacatgaaacatggacacacatttcaagcaacttcgtggctgcttcctcactttcatttaaaatttggttcaatttttttgtgaaagtggcaaatcgcataaaagaccaagtcaccgacttgtctcacaaggatcatggacctactatatatacacagatacggtttggtgacaggcagaaagaacttgaaaaaaacgagagaaaatggaagaattggaattccttgattgatcgaatcaagtttttttgtttagatatttcgttgaaactataaaataagttacaatgtattataagaaaaatgactaaaaagtttacagaaaatacatgtgtgcgcgcgtgtaagtttttagaacatgaattgcattttttatttcgcattggagatccaagtttaaaattgattttatatataatatgtttggaattatggtgaagacgtggtttttcacgtcaatttgatacgtgtatccatatacacataatttttttatatattttgatttcacgtgaaaaataatttaaaattgattttaaatttaaacaattttaagtaagtttttacattcgatgaaaaattttatattgagttctattatcttaatttgtttttataataaaaatatacaaacataaatcatactgttacaaaattaattttgttggcacaaaagcttaattccaaaatcacgtacattagtatttgagacgaagatatcaatgttgtgtatatagttgatatatctattttctaaatatatgattagaaatttgatcatcaaatttgttgtgtataaagaatatatgtactgaaagattaacctcttaaataagtttaatacattaagaaattagtctaccacttttcattagaaaaatatcttatgttaaaaaaatattgggatggataagcataatttataattattattttgaattttggtaagttacttttctgattatttgacgggttcaagatatatactatgttaggttgtcaggttggtcaatattaatgctcaaaagtgttaacaaagaccagacaaaaaaacgaattatttggtaaaaaaaataaaggacgacgtggacctagaaagaaagagagattacagtgaggttgctacttttgaatttgcatactttttgttcaactgtgttgacaattgaccctaaaattcttgcttgacaagtatacactatagggggcaggggcatgcatcagttttgaaaatttgcttcggcaataacaagtggcacgaaaatgagagttgaaaaatggtgccaacaatttagcagcaagaggatctggtgggtcatttactcatttctattgtctctactagttgtaattaaagtactaaagtatattcataaaagtggttgatggaacccaaaactaatgtatactttattgaaccatataaaaaaaactaaagttaattgagcaaattctatagtcactttgtgtgtacatgactattaaactgctgttaggttaaataacaaatattcatttacagacaactaaattagtaggaaaccgttgtaccttcaactatgtaaactgtacagttataactttatacatgtaacgtaggttttagttgacaattatcatttgtttaaaacaaacgtcggacccaattaagagtaaaagagatatataggttgattgtttaagccttttttttaaaaaaaaattaaaaacacagaatatcaaagttattttaattaattttaatcttaatcatttgtgtgaattatattcttgaatttgctctttttgtatgctgcatttatcatgtgatacattttctatatatacatgtgtgttgattgttaagatcaaattacttcaaatgtaatttttcnnnnnnnnnnnnnnnnnnnnnnnnnnnnnnnnnnnnnnnnnnnnnnnnnnnnnnnnnnnnnnnntatatatatatatatatatatatatatatatatatatatcatttttatgcatgtaaaagcactttgaattgacagcgaaatactaaacaaacacgattggttgaaaacaatttgagattctttgtggaaggtggttgagaattgagagtggaattaattaaaactgtctttactgatccagcttcaacaggacagacacgtctttaacttttgatcttttatccctcccaacatttaagnattatatatatatatatatatatatatatatatatatatatataaaataatggccaagataaaagaaggaaatgtgtgaataaaaatatttcaactgttgacatgtgtttagctagttaaaactttgttttaatatataagaaaaaaagtatgatttggtatttttaaatgaataaattcttaaaaattatttttctattaaattaggtaacttcttttatattaaggatactattcatttttttcaaatgttgttattggagtttaattgaaatataatttaaatatgtattgaattttaagttttaaatctcgactctctatattaaattcataaagataatgattatgcacccatacattatttcgatcaaattaaaatatgtattgaacttttaagttttaaatctcgactctttattttatcataatttagtgttgatatatatatttttattttttagtttccttcaaatttataaaaacatatgtactaatacagaaaatagttaggtatgcattttcgttaatatcactccataaattacttcgcctatgaagtaccgttttttaaaaattaagcactagacatataattaaaatacatttatgagcatagttatctctagatcatagttatgaatgaaaatgcatttgtgatctaattaattttgatataggtttgttgataaaatctatctgaatatataattaattgaattcacaatacataaattggttcaccttttataatcagctacttgtataaacaaattatgattggttatttaaaattgtccaaaaactcaatactagtgaatattaatatctacctctaaatttatatttaactctggattttactcacacggttatatatcgccaactggcaacaaagatataacgtgcgcgtatattggagtatatcgattaattaataaaagttttattattccctttacctgccgccattgttactattttttcttcgcattgtattcaacattaatattttgtcgtagattacatcaaacctcgaagcatcggagtgacgttttgcttctctgaccacatcaactgagaaacgaataaataaaaggtgtcacacatttcaaggcaaaaactcgtgtaccctacgtcttttttttatgatttttttaattactttacatatttcttttacaaaaatttagttaatttagtcaaagatattaaattaatgaatctgtcaataacttataattttattttaaaattattcttacttttttttatcaattatctctctcttttctcaactaatcattatttttatttttatcggtaggattcaagaaaatataaggttaataataatacgttagatttttttaatctaatggttacttttttcccaaaataagtactgtcttgtgttatttaatatatatcaagaaaaattaataaactataaataaataaaagagtaataattttataaaactagtcttaaggaattgaaataaaatatttattatgtaaatcacaaaagagtgtaaaaaaatcatagattttaccctacttcaatgacaattgtttaccattctatttggttctactcatccgtatctaattccaattgtttaacgctacaaacaaccctatcaagtcattggtacacgataaatttaatatgtttttttaaggcgataagtttactgtgctaatatatagtctagtttcataacttagttaataattagcaagacgttttagttatttatttctgttatgagtcgttgaaatggttggggaagaaattcaatgtaaggagtcctattaattactagagaaaactaagatatatgttttgattatactttcgttcgtatgaacttaagataaatataaaaagaaatttacagtaaattacatattttatttaataaattgaattagacttttttaattatatatttcttttgtcactaattataaaattcattttataaaataatttttaaatttttagatacaacaattatttttctctatatatcttcacttaattattctttcttaaatattaataaaaaataattaagtggatagaaaaataaataataataaaattaattgacatatttaaaataatattttttatgagacgtgaattacattagacataataattccgaagacaaaaatagaggtatggtttgggcggcggtagaagataaagataacgtagaatggaatcagaagcaaatccaaccaacgtcaaacaaatgaattaatgactgggggttgctagtgtttgacttttgggttatttatttatggtgtttggaagccacaaaacttttcgtacggtcaaaacactcgaaacacgtacaaaaaaaagaaaaaaactcacctacaaacgtttgagtcggtgttacgcgttggggtcttattttattcttctttcttttcttttcagtttcatttcagagtttacattggggaccaacaaaagttgataaatagcacattcattccaaaacaaaatatgagtttaatttttattgttaatataagaattttcgttactgataatttataagtatttttataaatatttaaactatgagtttagttcctattattaatataagaatttcgtactcataatttataaatatttttataaatgtttaatgaccttattgagacttactataaccataatgaatcctttatatccaagggagggaaacttattttttttttttaaaaaaaaaagagttcacattagtggcatggctagtagtgaccggtgaatcagtagaaaagtagtgagcaaaacataagaaaaatcgatgacactttataggccagctggcattatttaattgagaaacatgcactacagctacgttctcgtttggtggccgattctttatgtgcttttattcctcatcttaaaatcccatcctctatacgacgtcaccgttatatgtgttctcattccttacctcacattcctatatgctatagtttctattcttaattttatgtgcgacaactacttatatgtaactagtatattgatcagtattacgtatttactcctgatttattcattaagaaaaataggtggtacgcatgtatgatttatcaatctatttcatgtcttttgtaagatgagaataaaaaacaatcaataatgagcagtttttcgaataaattataattatatgtaaaaaatgaattggtggaaattttatcttttatatattaaaatggatatttgatatatttatatataagtttaattatatatggaaataattcaataagtaatatataattaaactaatataaataattcaatggtgataattttttaaaaattatttattattattaatttaaaattatatatgaaattatatatcaaaattttcatttttaattatctatatttatatcattattaattaatgatgatgatttgaaaatatatatatatatagacaccttttattaccatggatattttattttatattagtttgaatttaattaaaatataatttaaattcaatatgaatttaaagttttttttatacaataacagaaatgaaaatcaaacttaagttttcatgcatttacccaactcctcacaactaatttttttttcaatttcatccatatgatatgataaccatgcatgtatgtgtcctaatcggctactacttagacacttaacatgcatgctaatttagttttttattttctttttttaaagacgcgaagctgaccccattaatnnnnnnnnnnnnnnnnnnnnnnnnnnnnnnnnnnnnnnnnnnnnnnnnnnnnnnnnnnnnnnnnnnnnnnnnnnnnnnnnnnnnnnnnnnnnnnnnnnnnnnnnnnnnnnnnnnnnnnnnnnnnnnnnnnnnnnnnnnnnnnnnnnnnnnnnnnnnnnnnnnnnnnnnnnnnnnnnnnnnnnnnnnnnnnnnnnnnnnnnnnnnnnnnnnnnnnnnnnnnnnnnnnnnnnnnnnnnnnnnnnnnnnnnnnnnnnnnnnnnnnnnnnnnnnnnnnnnnnnnnnnnnnnnnnnnnnnnnnnnnnnnnnnnnnnnnnnnnnnnnnnnnnnnnnnnnnnnnnnnnnnnnnnnnnnnnnnnnnnnnnnnnnnnnnnnnnnnnnnnnnnnnnnnnnnnnnnnnnnnnnnnnnnnnnnnnnnnnnnnnnnnnnnnnnnnnnnnnnnnnnnnnnnnnnnnnnnnnnnnnnnnnnnnnnnnnnnnnnnnnnnnnnnnnnnnnnnnnnnnnnnnnnnnnnnnnnnnnnnnnnnnnnnnnnnnnnnnnnnnnnnnnnnnnnnnnnnnnnnnnnnnnnnnnnnnnnnnnnnnnnnnnnnaataattaattatcaaatataatgaaatgattgatttttataataattatatatatatgataattttaaattagttaatggtgtaaaaaaattatactgaaaatgtataaaattaaaattttatatttaaataataatatttaaaacaaacatttttctttcatttcttaaactaacattttaaaaaataattttttattttcaggttacatataagactctaaacaaaacatacattgtgttttttatacacaacatacattgtgtttagattggcgtttggttgttttactcttaccatgattttcaatcatacttgaaaatacatgaaagaaaattttagggtgaacgaaaaaaaaaatgataaactaggataagtaaaaaataatgtgaagataaagatatttgatttaagaaaaaaataaaaacagatgcatgtaaataaatgaacaaaacaggttaaaaataacaagtttcagatttttaaatttatatctttgtcatctcttctctcataaacacatttatctttttatttctgacttatttttttcactgtttttcccccaccgaacaaaacataagatattacacctgattttcaaacacgcacgtagtaacgtagtaacatacaatacaatgtacgtaaagcaaattttcttattacatcaaagcaaaacatacgatacaatgtaaaagggacagcagaaactggcgacgagattttgtggtctgggggaacggtacggtgctaccaaatgatggtggcagcgcagcgtggcccactctgcattcgacacgtgcacatccatgtactcctcttgtacgcgatgcatggagatctgaaatatgacagttggaagtgacaatgctttgtccatctaatctaattatcatcatttcactacttttttttaagagaaaaaacgtatctatctattttataataattctgatttcattcaaatttattttattattttggtcaatttgaataaaaaattcatttctgcataaagtttattcttaaaatattcagcgttaccttttaagaacagacacaagtgcaaagaaattggcttactggcttagcttagttttccttagtttcggtttgacttacaggtgtattcagggtatatactttttctaaattatttaaatatattttttttatttctggtatatatttagattttacgttgatcttttaataaaaaaaatttccgcatctgcatcttgatatttttaaaaaattgttttaatctttattatcaattaagtaataatataccaattaaatatttgatagcataatttatgattttttaaaaaacattaatatttgttaaaaaattaaattatttttttgacggttaaaaaccgtcataatcaattaaagttagaaaatgaataaaacatacattgtgaatcctccttttctagctctcatcttccacttctgtcacccatcactcccttccccatacttctccccttcccaattcctcgacctcctttgcctcttcctcggtccagcccaactactagatccacccctccatcttcctgtgctcctccgccaactcgactgcactgactccttcgactcaatgcttaccttcctctgccaaatgcactcctccaaaatcctcatcgacgagtccaccgccctcatcttcctcaagacctatgccacctcccaccacctacacggcgaaatcgaccccctcttcctcatcatggagtgcgacatcgccatcaaacctgacacgcacttcaacaactttgccctcagcctctttgtcaaagccaacaagctcaggctcgtcaaaacgctccactctgacgctgtttcacacgacgtctccactttcaacatcttaattagggctttatgcaaggtcccttagcttcatcccgtgattcttatgcttgagcaaatgcccaactacaacaggggaaggcacgtgtgggaatttggcgttcgagatctgggacatgcgactgcaacgacgaaagtccacagtggtggtggagtgggggcccactgcagatcaacaccgacagagacaaagaggacacataagtggttgaaggcagcgacacaaaacataagtgattgaaggcagcgacacagagaaggaggtggtcgcggaaaaggaggggggagaagaccttccctttaaaaagttgagattttttttattattatttaaacaatatttgttttgaaacaaatactgatgatttttgagtcatcacaaatcgcgttatcaaatatttaatggacacgtaattacttaactgacaacataaatctaaaacaaaattttcaaatattgggaagcaaatacgaaatttttttttatcaaggattaaacacaaaattcaaatataaataagagaccccctccctccagtgatgcacgtggaagcatgtcaaatgtctatgaattttttagattttggtttggaagagaatgactgatcaatgagggaaatataaagtattcctatattggattaaaatcaatggtcttcatttgtaaagctaagctggttcagttcaattaggatttaggagtaattcattatactaactatctaattataatgttattaaatccttttattatggttcagacttcataacgtctagtatattttatcctaatatatatatatatatatatnnnnnnnnnnnnnnnnnnnnnnnnnnnnnnnnnnnnnnnnnnnnnnnnnnnnnnnnnnnnnnnnnnnnnnnnnnnnnnnnnnnnnnnnnnnnnnnnnnnnnnnnnnnnnnnnnnnnnnnnnnnnnnnnnnnnnnnnnnnnnnnnnnnnnnnnnnnnnnnaatgtagtaccattttttggttgtcgttacttgtaagcaaaacaatcaaggtaaatagcagtaaaaagaaaaagcaatcaacgtaaaacatcattataaactctataatgattgttttttaaatttattttaaatatgctaataatttatagaaatgaaaacatatttgtttatgatttttttgtacaaaatgcaattatttaaatcgaatatcacattcgggagagacaattatagagagttatgttgtctacaaaattgtgcaaattgacacagttattcttcctttttcttttattcaaccgttattcttcctttatacataaaatttcgtataattaaatcatcaaggtaatgcatggaatttctactagtaattactattttattctatttatttatttattttataaaaaattatttatgttaaaatatgtcttgatccgggcctacaaatttaatttgtatatataatgtattatattcaacattaaatataattaggctataaaattatatttaaaatatattttacaatatatattttaaaataaatntaatttgtatatataatgtattatattcaacattagatataattaggctataaaattagatttaaaatatattttacaatatttattttaaataaataatattaatatgaatataatatcatgttatgtaaaatattaattaagtcaatacatttcattaataatatataattgttaataaaaaaataaattttaaacaatatataattttggatcaaattgaactaattcatcaaaagatattttaagtttatttttaaaatttaaattcgttcaaactactttaaactaaaatagattaatgtgtcagtgccgaatgtgaacgttcctcgctcgatcatttattgaagatatagatcttgtggtttgaattatcgtcatacatagtttttattgaatctgaaatggtaatatgtgctggcttgatagatatacttgtaattttttaaaataggaaaagaatcagaagaataaatcaaatgaccgaaagatgaaacataaacacgtagattcccaacgtatgtttccttaattaccacctaaagcagtccttttcaattttcatattaaaaaaacagaagagggaagagttagtttaattatatatttatatattatcttctcaccaacttatgcatatgctgtacaccactttccaacaccgtaagtttgcatacccaattattataatgccaatgtctaatttcaattttggcaggaaattgatagtatacttggtttagtttttttaaaaatgtttttttttccatttttttaaataactataaaaagtaattatttatttaataaaaacgccaaaacatttagacttgtaatcatataaaatattttacaaataaactgtttgttataatttttattagaataaattaataatgttattaattattaaataaatgaacaattcttgtcagtttaacttattcagtaaatactttaaattttaacgaatttcacttcatttttgttctatttaccattgcattttgcaacattagtaatcataaatattacttagtttgttttatattatacatgctttacacatacgtacccatgcttaacataccgtatgaagtgtaaagggctatacgtgacaaagtcttaaaaggcaaatcatcaagctaacgataatcaaacggtgtaaatggatttaataataataataataataataataataataataataataataagcctgattatagattttttttacaaaaaatataaatattattataaaaaattattaaatggaaagatgccataatcatatataattataatttaattcagttacgattatatgaccatattgcaaacaatgacattcacaaatcacgatgatattgcaataaaaaaaaactataactaatttcctgttgattatatgaatttatttttcttaacctcctattttttaaatttgtggaaataacaaatgtaacaatactttatacaatttctaatatagtgaggactaaggatagcaaaattaattataattcatcaccatgtgagataaagttttattcatttaatattttctcttacagataatatatgctgtgtatttaaagagctaacatggggttgatcccttttgactatttggcctgctagcaaaaagactttttgttgctactaataagccaatgatacaatacaagttcaagtttagagcctgtgggacatcctgatctcattacaaggaaagttccaactttttagctttcacatccccaaacacaatttcaaattgataactttgtatgcacctcaaattaacaatcttttttaaggtacagtacgcaatgaacatataaaaaattgcaacatttttcgttagcaatgagctccttatatactctttaccaaatcagccacagcaggcagaaagttcataagccacgaattcaattagatatatgcaaattaatggttagctttggaataattgacaagtgtttggtggttaaaatacttaaactacgtaacgtactaccccttcgagggagtaggaattatctgagatgacataagcagtttggaattaatggttgattttgctaaagtcaatctcgttctcacttggaacggattgaagtttacttcaagacatggtcatgaaaatgacccctcatagaaaggaggaactagaaagcgaggattatttcctagaaaattatccacaatttcattggaggttaatatgttataaaagaaaaatccccgcaagtcaaatcaaataactttttttatttttttatgtacattaactcataaaacgcccaaaaaataaaatagacacactaattgttacaatataatactaaaaaacatatcaataattaacaataataatttataaataaactatttgtgaatgttatacaaagaatgcagatgaaagaaaaaacgtatataaagtagaaagaaaaattcagagaaaaaatataaataaataaaagataattacaaaaaaaattaattaagaaactctgattttatannnnnnnnnnnnnnnnnnnnnnnnnnnnnnnnnnnnnnnnnnnnnnnnnnnnnnnnnnnnnnnnnnnnnnnnnnnnnnnnnnnnnnnnnnnnnnnnnnnnnnnnnnnnnnnnnnnnnnnnnnnnnnnnnnnnnnnnnnnnnnnnnnnnnnnnnnnnnnnnnnnnnnnnnnnnnnnnnnnnnnnnnnnnnnnnnnnnnnnnnnnnnnnnnnnnnnnnnnnnnnnnnnnnnnnnnnnnnnnnnnnnnnnnnnnnnnnnnnnnnnnnnnnnnnnnnnnnnnnnnnnnnnnnnnnnnnnnnnnnnnnnnnnnnnnnnnnnnnnnnnnnnnnnnnnnnnnnnnnnnnnnnnnnnnnnnnnnnnnnnnnnnnnnnnnnnnnnnnnnnnnnnnnnnnnnnnnnnnnnnnnnnnnnnnnnnnnnnnnnnnnnnnnnnnnnnnnnnnnnnnnnnnnnnnnnnnnnnnnnnnnnnnnnnnnnnnnnnnnnnnnnnnnnnnnnnnnnnnnnnnnnnnnnnnnnnnnnnnnnnnnnnnnnnnnnnnnnnnnnnnnnnnnnnnnnnnnnnnnnnnnnnnnnnnnnnnnnnnnnnnnnnnnnnnnnnnnnnnnnnnnnnnnnnnnnnnnnnnnnnnnnnnnnnnnnnnnnnnnnnnnnnnnnnnnnnnnnnnnnnnnnnnnnnnnnnnnnnnnnnnnnnnnnnnnnnnnnnnnatatttctccttgaaatttcattgttaaagaatgtgattttatttaaaaaaatattattaatgtccacttaatgcttcaaatataaatttactaacattatgaagcttattttcttaattggacagtcaagaaagtgtacgtttaattgacaaaaaaagtctaaataagatagaccgaaatatactccaaactcaaatataagcgaaaaaatttaattcatagtaattaacaaaataagttaacatcatttaattttgatagtctcactataaaaatgaatttgttttttnnnnnnnnnnnnnnnnnnnnnnnnnnnnnnnnnnnnnnnnnnnnnnnnnnnnnnnnnnnnnnnttttgtttattttgttttagtccttttaatatatatctatttttttattttattccttacaaaatttcttcattttatattaattcttttgaaaaacatttgataaggactaataacaaatgatctatatatattatagagataaaaatgaatatatatatatatataaaggattaaaacaaaataataaaaattaaaaaatatatatttttgttttatttggaactcaaacacaaaaataattttattaaagattaaaataaaatttgttaatttatcgaaaaacaaacacctaatttattagtaccatctaaaatcatggaactaaatttaatcaaaaaataaattaaatgatcaaattgaaaaaataaattaaataacaaacatagtaattaaacctggaaattaaaaggataattgccccacaatcattttttaaaaaagaaaattttatttctatattttatagattcatttttttaggaaaagttatcttataagacaatacctattttttggtggggtcaattttttttattatgcatatacaaataaaaaaaaattcttatgagataattgccctcacaccctccacgtgcatccgccagtgtgagtgcagattaacactactcttattgtatttagagtgaaagtttaatttgacatttttatttttgtattaatattttattttagttaatttttgcgacaaatgaatctaaccttctgttgaaaggattttaaggacatacacataagtcagaagtgaatttagtagtacatataatgaaattattattatttaaataaggctaaaaattaaatttttttgtaactattatctcacttcaaatttaaacgatacataaaaactgagtacaagttcacaactaataaaatcaacaatttgagtttctaaaaaaagaaaagaaattaaaataagggtacaggtcatgtcatgggtctgttggtaaagaagccacataccaaaccatggtctttataaaaataaagggaaaataatcccaaaaccaaaacagaagaaaaaaaaaaaaggaatttgagtatacttgttcgactccacatggttggaaagtggaaacactgtttctttctctctctacttcctatctcacactttctcttcatatcttattcttctcctcctaacatgtataaatatgttaagtgattaatagcaaaggatcccattaactttgttaataagtgcaagttagctacttagttcaattttcctgcaccaacatttcaaacactatcatatcatatcatatcttaccattaactcaaagtaacagtgttccattaagattttctcatctcatcaaccccattacagattcttctcttttctccttcctggttttcgaatcttcaggtactctaccacccttcatcaactcactcttcattttccttttgcttttaagaatctattttaatatgtttgtttctttttatggaataaatgatatgtatatccatttctgcatattgcatactgtgctgaatgtttgaatgctatgctattctacccaatctaactaaatatccgtgaagaaaaagaaatatgatttttttattcatgttttggtgatttttttttagatccttgctcttctttaactgggattatctgtgatattttgatttctgttgtttggtttgtttggaatctgtttaagagaatgaaatgggatttccttggtactgtgtttcaggttctcctttcatggatatgagactgttttcttggatttttctttaaaaatgggagtttagctaatgggttttgcggatccgtgatccttttgtttctgatggttttgctgcagcatagaatttgagttcttgttgatcagttcgatgaggattacggtgctgctgttcctgcctagatgataataaatagaacaatgcattctaaaaaatgggtcttaagaattttatttttctattttttttttatttccaacattcatttatcttgatgtaaattgtgtggttgtgatgtgagtacggtctgaatttgatggctttggaacctttgtatttcgaattattgttcttagcattgatgtacgtattccatccagtttgacacatgaaaaattcatcatcttgtactttaatattgactttgcaattttcaggaccacggattgcacaagtttctgcagattggttttgctgtcatatggggatttccttctcatgtccatttgccaagtacaatgatgtggaagatggcttagactccgttgttgtaaaatccatcaactttggcaatgatgaaatcaaaactccaatgcgatcggtcagtttcaagaacgaagatttagaacccaccatccttaaatctctaggttctggaaagatgacaatagaggcatctgtgagcttcaaaagaaaggacattgataacattatctcaaccaacactttgtcatttgacaaagaggaaaacatgcctatctcaaggactagcaaaaagagcaaagaaatggatgatcttccttttaagtcagagtgtcaagtggaaaccatccaatcagcacttctaaatccaaacagccccaaacacattgcagcacttaaattgcagaaagtatacaagagctttcgcactagaagaaagctagcagattgtgcaattcttgttgaacaaagctggtactttttttatttgcctgagaatctctttccttctttacaaaatttcatgtgtttttgacatgttttaatctttaattttataggtggaagctcttggattttgctgaactcaagcgcagctccatatctttctttgagattgagaaacatgaaaccgcggtttcgcgttggtctagagccagaactagagctgctaaggtactttaacataattagctttggaagggtaataatggtgattattgaaggttaataccttcaataactactatgctctaccttgctagttcaaactttcaagctgcaagaaactgaattaaaatttgctctgtcattgcaggttggaaaaggtttatcaaaagatgataaagctcaaaaacttgctttacagcactggcttgaagcggttagtcaaacatggctgctctagcttttttttttctgcttatgtatcggtctgttagtcattcatcaatttttacttactgagttttttttactgtgtgatagattgacccacgccatcgctatggacataatctacacttctattacgataggtggcttcagtgtcagagcagagaaccctttttctactggtaacattctttgtaaaatatatttctgagttacaacttatatttctcctatatagatcttaagtcacatgtgtttgaaattaagcttctttgaaattgcaggttagatataggagaaggaaaagaagtaaatcttgagaagtgccctcgttccaaacttcaacagcagtgcattaaatatcttggtccggtaaggtttccgcaatttatacaaacatctcttgatagacaaatttgctggagattctttgatttcaattgttattaactgttttcattttatgttcttacagatggaaaggctggcttatgaagttattgtggaagatggaaagttcttctacaagcagacaggagagctccttaacactggagaagatgcacatgccaagtggatttttgtccttagcacatctaagacattgtatgttggcaagaagacaaaaggttcatttcagcattctagcttcttggctggaggagccacatcttctgctgggagactagtgattgaaaatggtgtcttgaaggtacaaatctggcataaggcttgtaaatatattactcttttactggattcttatagccatagatgactactttttttttatttttattttatatgctcagaaaatgagtttgttgtttcttttcaacaggctgtttggcctcacagtggtcattatcgtccgacagaagaaaattttaaggaatttatttcattccttcaggagaacaatgtgagcctttcagatgtcaaggtatagatacttagaaccattgctttacattactttagtattgtttgtaatggtttataatttagatctgtaattacaagatgtgaaacaatatattctgaggaaattcattttgttatatgcagatggatccagttgatgaggctgatgacttgctttctctgagaagtagtggtcatcttagaagccactcatctgaagaggacttcactgagaacatgaatggcctggagattgaagagaccattattgaaggctcagttgcagcagagaaggccaatttgatcgaaaccgagaggtcttctgcactgatggcaccttgcacaaggcaatttcaaattcttggaagagaactgagcaatctagaaataccaaaaaggggtcatgtgtttgaaggactagaaaatgagatagaagggagtgaccaaagctgtgtgagtatccaaatggaatctcaagaaacaaaacaagcatttgtaccagagctggaccatacaaattcagagaaaaacttatctgatgacaatgatgtagaaaccattccacaagagtccatactaaaaagaatcaattcacataaagaaatgaaatcatatcaactggggaagcagttgtcttgcaaatggacaaccggagcggggccacgcattggctgtgtgagagactacccttgtgagcttcagttccgagctttggagcaagttaatctgtctccaagaagtggatcccgctctaaatcatcctttgctcctagaagcaccactttgttgagctctagtctttcaaatgtagcaagtctgtctggggacttaacaattgaaccacttcacatgcctcatagaggtgagtccaatagttcaagatcagaatgctcccctttgatcagaggatcatcagtgataccagttattcatagttcatgagtgaataggattctccattgttttattcttttttgtgtcaataggtaaccaattaatatatgtatttttgttattctttccattgatgcacacaggcatttttttttcactcatgtatagtattataggatcaaaactcagaagtgtaaaattattttgggatttatttatcctcccaatacaaaggaaacatttgatcttccaccatgcaacaagttcatgggttcaattcaaatatatctatttatagttaatatattgaaggtttattgatgatgcaggtttatattatccttttctcactgaaatttaagtctaatccacattattttttgttatgcggctgaggacatatttggacttaaatatctacaatggtttaatttttcagggaaaccaaaggtctctctgatgaaggcaaaaaaatttaaataatatttttttccaattatttaccaatatagggctgtttcaaacttatttaccaaaatggtgcagccagacgcgcttgcatggggcgtgtttcaggcacaggtggcgcgatgtaaatataaactttgaaaaatcataacttttgattgggatgtccgattgaggcgaaaccggtggccacgcgctcaaaattgagaggagaagaatcggacatcctagtttagaaaagaaatattatttaggttcttttgccctcttatgaatcttgtttttgctaatttgtttatttttatttgtatttagtttggggaataaagaaaatctttaacaatataacataaattcttatcaaaatctttatgaagataagataataatccaccaacccacttgttatttttatgaggcacaataggtagaatttatcctgaaaacagaagaatgatcgagaactaatcataagagtttatgtacaaagtgcttaatgacttcattaatattcgattttttcagcaatttagttgacaaagtcccaaaatcttcatatgctaattgaaatcgggaagtatttatatatttaagattggcttattataatgttttgaaaaaaataatataaaacccactgttcaaattggtattgtctagttgggcttattaagcttcgcattccatgctgtgcatgacactatctatctatccattagtatgtgcaaaatgatgaaatataattgcaaccattatgatgaaaagtgactatctttttccttgcattgcttggtgcacgttaatctttctgttcaaacttaactagcaaggatagcccgtgttgtagacgggtcaatatgtaagatttaattaatatattagattgaatatattgaaatattatgatgaaaatgaattttcttttagactcgtggcaatcttcttttgtggtgcatattctctgaacattgatttctctggttcccttattactactttttagctattaaaaatagtagttcaatttttcttttctgatgttttggtatctcgtggccttttttcggtcaaatttcactgttagaggatatgatcaacaaatttggatttatctcttttaaaataggtatataaaatgagaaaataaggataaatttgaatgaagcactactatcttatagaatgaactaacttcaaatcaatggtggtggacaaataatgctattgctgatagttatcacggattcaaagcgtatttgattttccgttagcacaaattttcaagcatataaacaaaataacaattattaattactttatgctaaacatgtactcaattcgcaaccctgtattaatgattgctttctttgattgagaaccaaaatttggctccccctaatttgtcaatattggcgtgatgtatatatagtattaaatttggcacttaattttagataaaaaaagtgagatattcaatgattaaacttatatatgaatttaattaaaatatatattatattatcatctaatcacaaattaatatatatatatatattataataagattgataatttttgtcttaaaagtaatatctaagtttacgttatcaaaatgagacttcccacatatacctatatattgtggaaaaaaaatatatataataggtatagttggtttcattgcatgtatagatagaaaacgagatatttaactagttaaacccaactccttttgttatcggtttctatcaaagggttgacgcctttttttttctctaaaatattcttttcacataaatatgattctattatacatttgtaattttatagaaaaattgtgtttatgttgttttctgaacaagtgtgaaaataaaaacaactaaaacaccatttcgtggtatgttgtataatgaaatcatagttttgttactttatgagggggtgaaaaaaataataacggaattgtgaatctattttttttaacccaaaaacataactaagctttcattgcccatttctttcttctttttcctttgcacgtaggggtgatgaatggtggggaatatctaggtcgatgggtctagattggtgtagatcaaaggtgtttggtcacggtgacaacgagaatgcgtagcattatggacagaggtgcaaggtcaagggttcgcacgatgttgcaactatgtggtggtggttttgccaaggggtcacgtgcacagatgtactgttggggcaatgagcggtgcatgacgatgttgcaatggtatcagggttgctgggttcaaagctggacaaaggtggtggcgcgctgcgtgatgtggtggttatgggttgaatggggtgaaaagaaggtgaagggaaagaaggggggagggtaagataatattttctcacgtttgtagtggccaataacaaaaattgtaggggttacctataagtcaaattagctaatctgaagttgaaaaacatttttcatgattagacaagcccagtaatttaggggatatgcagactatattaaattgagaagagtccatgaattatttatttatttttaagaacataagagaaaaagaagaaacgaccaaactaggaaaattttaattagtacgcttctaattgataagaaaaaataaataaaaaagataacaaatgaataagcttctttgacaatatttattttatcataaatttaattatactaattaaaaacatagacactaatgtgtttatacttgcatttttattataattttaatttatgcaaaatggaaaatacatattgagtaaaaaataaattaataaactaaaattaatacagatgtcaatgtataataagaaaatttattacaatatatcaaacttaatgtcttgcctaaaaatatacacataaatgagtgataaaaataaatagttacaatgtgtcaaatttaatgcagtacatacgtaaacatatcgacacaacaatatataaagaaatttttataatatatcaaagttagcattttgaaaaaaataaatgagaagacnnnnnnnnnnnnnnnnnnnnnnnnnttacatacgggtgtatataaacgatccaatccaataaggatcgaaaaaattaatccaaaaaagtaaaaaattgaaggatcaacaaagttgaaaatcgatgttttttattaaatcaaattggattttggatttgattttaaaaattgattcaaatttaacttatgcatatgtatatatttttattcatacatttataatatcatttatttttatatcttataaatttataaaattatcatagaaattatatcaatttatgaaatttataattaattaaaaatgttttactgattatttgaggaagatgcttaaatattctattattagttatacaataacacataaatagatgtttgatattttaaattattttttattatatttattatatatcctatattttatttaatatttttctaaaaaatnnnnnnnnnnttaaatcaaattggattttggatttgattttaaaaattgattcaaatttaacttatgcatatatgtatacatttttattcataaatttataatatcatttattttatttcttataaatttataaaattatcatagaaattatatcaatttatgaaaaatataattaattaaaaatgttttactgattatttgagtaagatgcttaaatattctattattagttatacaatgacacataaataaatgtttgatatttaaattattttttattatatttattatatatcttatattttatttaatatttttctaaaaattaaataaaagtatgattataattgaaaatcaatctaatccaaaacagtttaaattggattggattggattaaaagtttaaattaaatcatttgaatgataaattaaaaaaatcaaaaaaattgaattgaatgattttttttccaaaattaattcaatctaatccacgaatatcactgccattacgggatggttttggccatgctcatgaccctaacttttttttttccttttgttatgtgtttgcattatttatttttttgggtaagatgctaaacttgatataaggctataatttttcttattatattttgacatgtatattaattttaaattattattattatttgtttaatgcatgcttatatgtatatattttgttacaagaggtaaaaatgcatgtttataggtatgtttttttgttatgtattattttggatttaataaaaaaaattacatgtttatttgtacatttttttctttttggataaattggtacttttttcgatttcaaacataagttatttaatattttttcttcattatattaagagaaaaggaattatatatgcactaacaacataaaatatttttgtagttatttaatcttaacttattatgtataataaatttattaattttaaaaataattatcttaaaataatttatgattgaatgataatataaaacaagtttacaatgttaatgtagttatattaaactcccatattaatgtcacaaaataaaaaattaatcactatagtttcattatattacttagtttgtcaaaatattttttaaataagattatataatatttatttatttatctttattttataaagataaggacaaagatcaaagagtaaattacatttgtaccccatgtattttgctcaaatttagttcgacaccctctcttttttcacattacttttaccccattattaatgtagttaactaaggtaaattaaaatatgtgagaagacgaaattgtctttacattttaattgtaaaacccaaattatcccttcccaattagtttcagaattaatggttcaagtcttattccttttcatcattcatgagtactattcatcttctacttgttggtgagtttttcttcatcgtccagagtgcgagtttcttttcctctcacgatgttcacgttccactcctctttaccgtttgcgagttctttagtatttctcttctagttcacgagttctccattgttcctcttcccgttctatcttcacaaacatcttcatttgtcttctttcgacattcacgagcgctgtgtttctctttctgttccatgatttctgttcatgctagagttatgtttgtatgtgacacttgaccttgtatatatgttactttttaaggttatttatttaatattgattgtttattattgcctattaatgaatgggatttcaatgggggaccattttgggaccacttataattttcaaaatcatttatttattattgttgataaaatgatgttgatgtttgggaccacaagaaacacaatggatgaactgattgtttattattgttgattaaaatagtgttgatgtttgagaccacatgaacacaatgaatgaactggaatacatgagtcctaaaccagacaacgtggatattttggtccactttacggactaacgagatgaactaagtgaaatatgtaatgttgatcatgataagtttggaatgtctgatgcacataattgtgtgaccaacattgctaatgactaatacttgtcatcatgtcaccctcttattttatggttttgttctattgttagtggtaaattttttccccttaagactgatcatgacatgctgaaaatgtttgttaagaatcaaaatttagtttatattcatatgtatgttaatataacaaatgatgagttttagaacctatatgtgagtggaaatgtaaatgaacttgtaagtgaaattgtgaatgaatatatgaatgaaaaattgaagaagaaggaaaagtgttaatagtgtgtatcaataatgtgagttcacatccaacaaaaagatgaatttatttttaattatagaaagaataaaatgaaataatagtcttaaatattttcaagttaagaagaagataaaagtatttttttattaaattattaaatcatatttaagattgagtacgatgtaatgtaagttaaataattaagaatatttttgtgattaaaaaagagggaggcagcagatgaaatttaagcgaaactgaggatatagcgacggaagactacgattgaactcaatttacatcgaatccctcaattccaataacgaaccaaccaaccagcccttttttattttgctcgtgttgatcgcaaatcctcatctctattcgttgcaatccccactgcgccactttccaggttaaccctaattcttgtattctcccactttcaattattattctttttcctcatcacgttctcgttcaatatccaatttatttgtcttgctgcctaaacaaattaggtcatcgcttggtttcatgctttctgctaaacaaattgctgtgttgtttgtgtgtgtgtgtgtgtttaaataacttcctgattagtgatcaattcaattgcaacactgcatgcaatcgtgaaacatttttgaaagcgtttttttttgtcaacttctgtttcttcgtaaggtgtactgcattgtgaaggacaagatttttaagccgttgctttgttcttggaggtgttagactattaggggctgattgttaaagacggcacttgtttatttatatgcctaattctttatagcaaaaaacctaaaactactccgaagtagaaggaatagacgcacccagtgattgccaagggccctaaaaattagaaaaatggtgtttcattggaagtaaccttcttatgttgaaagagtaaattgtttgggagaacatgcgtgtctgataaagagcgatcgatgcctcccacttatgcagcaaatcacttgtattaatcctgttgagtactgttgcctcaaaacaaaggacttgaccttagagagagttatccatttctgtctgtatttttcaagagtgaacttttggggggttaagagactagagtgtccgaagttaaacaaaattattttacaggtaagcagaatccaaagttcaaactttcctactagagttggttgagtgagaagtgagaaatttatagaatccaataaagactaaaggggttttaattcacttaatgtagttaagggtttgtggcacctcttgctttgaggtattaaaaatccccagtgcctgtagggagcttttgcctttaacttcatctacacggaccagtttctctataactcaagcatctatcaaactgaaaatctcaagataaaatatgactctgaataaaatacttttttttatgggtgtgtcatgcactgtagagaggttgtaaaggcaaggaaaagcctctaagagaggaaccagccaaaattgatacagcatcttgttggggtccaggggagcctgaaagcaaagaagacctgcaccattgggcctagcaatgaactacaagagtgaacttggcatcacattttcacccaaaaccttagggaattgggtatattggtctgttcccttatgttaccttcatctagcccattcttaactaatgtggaactttgaacaaacttgaatttccaacacatgtttagtttcacagcctttccttgttggcgttgatagctttttcctgtgtttgctatgatagatcaataactagatcattccaaatataatattatatctaataatagttttataggggtctgcagaggtttttctttttaaatgctgagtattgtttatgttttttttttttttttttttanagacattccaaatataatattatatctaataataggtttataggggtctgcagaggtttttctttttaaatgctgagtattgtttattttttttattttttttaataaacagtgatctatattttccttttgttttgagtttattattctgtcactagcaaagtgaaagttgatagctgtctaatatgtttttttcaataccatttcatctattgcaaggcaactaggtttttgaagttttggttttcttccccacagataaataccttcattaccttgtgtcatgcatgtgagtaccttgtgaaattaagttttcaggcttttgttggagacttgcagcagcagtagatatctgtagtacatatcaaatctcaaaatatttaagtacactttgctattttaataaaaaattgaacttacccctccttacaaggcaaaaagatttatgggtgaaatacaggaatgtttatgggttttttccttgtggattgatgtttttttctagtgcttatatgtctccttcaggtgacacaatgccattagattttaagtatttattaatcaaaatgaagttcttccatctgttttaattaatttgaaattttgtaattgtcaataaaagtgtccaaagaaagtgcatgttatgtttataatttttaatgtactatttattcctgtttatggaatatgtcagaattatataggcatgtataaattgttgatatctaaattctatttataagaaaaattaacagcttgaacttcttgatccatgattactagaaactcaattctgcattacgttctagtgcttcctgtgccttctcatttcttttaaatttataaactttttatgcaatcgtcaactatgctagattgctaggttaatgaaatcttcaaaacctcaatatttgtgaatagatacaagaatcagttactcttttcttgtatacaaattgtgtcaggataaagaggcagagaatttctatttcattacgtaatccgtttaattttggttgcttgaaataaggcagatcttgtttttagcagcatcttgaatttcaaaatgcctaaagttagaagattgaagtccccgtctactgattgtaatagaccatatccttacccatccaactccaaaaacattgagctgcataaacctataaatttgttgggatcagctgatgaaataaaagaatgggaggaagctagatgtcctatttgcatggaaccccctcataatggtgttcttttgaaatgttcttcctatgagaagggttgtcttacttacatgtgcaataccagttaccgccactccaactgccttgaccagttttgtaagtcctttgcttctcatctctcatcagaagtactgcaagaaattcctgtcacaggcagagtctctcacagtagagaaattcagtcagagtctcggcaccccactcaatgtgggagccagttacaatcaaagctcatttgccctttttgccgtggagaaatatatggatatatggttttggagcctgctcgaaggtatatgaattctaaactaaggagttgttcttctgaaacatgtgaattccaggggacatatccagaactcaggaagcatgctaggtctgaacatccttctgttcgaccatcagaggtggatccctcgcgacagtgtgattggataaggatggaacaagaaaggggcttggaagatctttttagctcaatccattcaagttctgttgcagattacaatagagataccattttgactgggggtcttgctgacttgatgtcctcgttcttgtatgaaatatttatctctattgaagatgttaaccgtatggctagttttttgactaattcaagacacagagtgccattatatgacagaaggtctggtacaacacacagggtatcaaatgatacacagacaaatcaatcagctcgatggagatccaatttaccttcaatgcatcaactggagagaattgctaggagtagagtgagaaccaattttccatatttatcatcccgtaatcttgaggcagaggcaaatcgtactgctagatggagaacaaatatgtcatcttttagaatgcctcgcaatgagcatcagttttatagagacctcagtgcagaggtcacatcttcaacaaggatgcctcgggcctcacaaggtactcagactaatccccagagcaacatttcttcatctggaagtggaaggtttcctggtcgtcaattacgctggcgtgatcaaagatggtcgacaaacaaccaccaatgatgaatggcaatagatacttctgtttcatataattacaaatgtttacttctgctatccattatggggatacttcaaactatcatttaacttcgttttattggaggatttggttaaatgcaatcgttttatttgaatttaatgattccttgcatgctcaaagcaaccacaaaatatttttctaattatttttgtttgtttttcatctaaattttagggatagactatttttctaacattttttctttttattaccacaagattagaagcatcatttttcaattttcatatcttgcattacgttgtcatatccaatttcttgtaccatgtatctaataattcaaacattggcttgatacctttaattgcattaatttcaatagattttaagaaaatatttttacctgaattgtcaataagaaaattagcaagtgatatctctttcttttttgtcctaccatcacatgtcaaactgcaatctcatatctcgctcacctgtatttttttaaactttttttatttgttatcatttgttttattcataaaggaaatcttaccttataataagtaggtggtttggaatatctatctattctttaatatcttttaacatttttttaccagattaattttctttttaacattaattaatgacaacaaagatagaacttaagatccgagcaaattaaatggttatgtgcagttccaccatgtatgcatttgcttatttcttgaaagatatcattcattatcttttagcatcttcatttaatgacgagtctattttcccctttgtattagcatcttcatttcctgtgtcttctaaacgccctaggttctttttatttttttattttccaacaataatttggtaaacattttcctaatctcgtcgagaatacttgaacagacaacacattttcccttattctaaaaatgtgataagatgctttattcttcaactaaacaacacaaagcacaatacaacaagaacaaatctaagaggtaggagaccaccgaccaatagtataataagcaccaacacaacaataaaaggcaacaagggaccatcgaactagctcctgtgctgaggggaaaaaagcatgaaatggagcatgtaaagtgtcgtggaaaagaaaaaggaaaataaatttgtttctcttaaatatttcgtatgggacactctagttatctttagagaccagagaggcgagatcagttgatttcctctcatttgcatttttttttactgaagattaaaacaaaaaatattagactatgacaagaatattgaaccttttttttacactgcaaaatacttatatcattcattaataatcaagacattgatacaatcaggagcaatatcaaatgtcagtggactagcaaatatcctaaaatcatttaagctatactactttaacaacactaagaaatgaagattaatgaagagtattagatggaaaagatgcaaatggatccacaaaaggaatcacaaacacgtgttctattctaccatactaatactattaccaaacaactcagaagttatgtctcaaaggctcgtggaacgatataaaggcgccttatctttactttcattaagattaaacaaaataagcatcaagaagttcttgaaaaaaaatacataacaaaatgaatatgttaaaacaataatcaaaatgtcagcctgcttttgatgttcttgttacatttggcagaacaacagaatcaagatccccaggataaggggtaaacaagcctagtcctcccctactttcttttaaattgcctttcttaagttcatccaactgtttaacccattctatgggagaagagtgctctcttgtgtgaggatgcaacacaaacagtgaattgtattcacagttgggaaacataaagaatttgaacgcgtcccccaatctgtatgcaacatagccaaaactcagttgatctctgggagtgaagaggtgaacctcattgaaccacaagcagctaaataagttatttatggcagtatgttcccgaatgatgacagctccctctggtacatctgaaacatcatatattattgttaacaatacgcatcaccaaacattatcattagagaggaacaagagaacatttgaatgaatccatgtgtcttaactatacagcagatagtttcatttataattagagtaaaaaatacaatggttaacggttacataattatacagctcataatatccctcagaaatctgtttttaaagagcccagtaacatcatgtgatacatgtagtcaacatcatctattgaaatacggctattgttgttattgttgtatatggaacaaatatgaacaaaattagaaaattaacagaaatgtgacaaaacaatatgtttcctcttaccaaaattgttgaaatcaaaccgtagaaataaaatataaaaccagaggtcttgtttcctgtcttaccactattggtctttttatttgaattccatggcttcattccctcataataatagattttaatgtggagatcaataaggggtcgagcatatcgctttcgcctcttgtttgaatcagcctcctcatatatactacggtgatgcttgtgttgagcaatggcaaacgtatgcttgcctcgccataggtatctgcataattaaggtagttttacaaggttacagtcatcacaagtcacagaaaggcttgcacagacatgatcagcagttttttcaacaatacagatgtagtaagtatgctcttaacatgaaacttcaatgggtgagtttataacaatagtttcagtgtggtttctcctgctggttgaaatagaatattcattcaaagttatcccgttttatatttttacattaatatccctcgtggtatgtataattgtatgaattagtgctttcaaaaggaattaaatatgccgttacacaacacagggtatgaaagtgtcatgtgcaaataaacgcaagggaagtaactccaggaatcaagaaaaaagctatccattctgctagaaagttttagccttatcagtttcaagtaccattttcatttgtttgagaagagacgaggggaggttagtgtcaaaactacatcacaaggggcaacatagaaacctaacatgatacaatcaactgttatcccaaaagaaaatccagaaacacgtaacaagcaagtccctaccaaaccaatactttgcttctataatgcatcaacttcatgattgtaaatatataaagactatgtaagagaaaaatgggaaagcaaaaaaatccattaaattgagtccttcaaacagagtgccccataatgtttttagtgtaagtgactgatcagtacatgaaatgtatcaaattcaaaattatcaaatgcctttccctcctatccttctaagctctcttgagtaagaaaaggatggcagtttaaatatctatccaaaaaaacaaagatttaaagtgttgatgttatcataaaattagggataaaacatttaaacagatataagtacctatcaaggattagcagtggatctactatcagctccattttaccatcaatccaaatactatactgtgcttgagggaacaacctgtgggttaaaattttgggaaccttcccattccttcttggttcatcataaggaggatgcttaagaagaataagtcgccatattcccacccattttccaccagctccgtcttctttgacagtaccattttccctcatgaatttcagagatacctcatccaccaccataagaaagcaaaaaagctcctttgagcgaaggcttatatttgatggttgatgaggtaaatcgtagccatcaaaaatgccagatgcaacaacaaatttgcatttcttgacatatttgatgtctacatgattcatttcagcaccaccacctcgaatgaatccacaatgcacctaatgggcagagcacatgggaaaacatgacttgttgattatggcaactacgacgcaatcttgcaaaattgtgaagcaattgagattaaaatgaacttgagcaaatcatgctaactaatctaccttcatatttgattttagtttgaaactttcctccctttgtttccaacttggatggcctccaaatagaggagatgactgagcttcactatgtcgaacctcatcttccataacatatgacagatttttgagaattttgttgggagttgttccagttgggataactattttatcagggtcattggaaagaggaattggacatcctaacgaacataggcagcaccaatatcaaacacacagttatcatttggtgaagttcaaaaagaagggatggaagcaaaaccaccaaaatcttactgtgaggttttgatacaagtcccatattgcctaacatgttgtaaaccttgctatctttgttacacatagctgcaggtcaagcagaaaattgctatattttcagaaatgttgacaattttggtggaaaaaataaaataaaagacaaaatgtttataatgaacaagcatttcttgaagtatgtctacctaacagaacctcccatcaagttatcatcctacatttgtaaattctaatcatagcaactttgcatctatattcactaatcagattgtagatatttgtatttacaaagttagtttcaactaacttaatatagataaaattaagacaagtgaagtcctagttccccttacaaataccatcaaagaaaaacaataattaacaagaaaacatcacattaaattcaattttctgtactaagatatattatactaactaacgtacccccgtaccagaaggcttctatacgaaagtatgggagaggactattgtatacagccttatccttgcatatgcaaagagtttgtttccgaattcaaacctatgaccaactggtcaccaagcgtcagagctttccctctatgcctagaaatattatactattcttatttcaactagaaaataaagagttgctaaccttctaattccacagtaaatacttctaaagaattaagctacgagttgaacttatgagtatgaaagagaaagagacataagacttaaccttatctatagtgaaaaatgaatttccaaactgttctttttaaaagccatcatctatgaattgcaagaaacttcctgtacatgttggttttctagtaccaggaacaactaaaatcaacgggcacaggcagctacgaagatcaagttaaaatataaagcaacgagatttattcccttcaacccaattctcaaaatatcacattgagaatatacagttagatgaagtgtctatgttattacttattacaattaagtagtagttatcaacaagagataaacttaagaagatttcaaaaaagtaacgaaatttattaaaaactttactaacctgataaaaaggagacggaagtttgacaagaccatatatggaacaacaatgcaagaagaattaataacatccacaagatccctgctacaagaaccaaccgaacaaaccctttcttccaaacgatcttcatggggtaatcttgaggtaccctccctgaagaaaagaaacccacctcaaaatctgcatcaccaacaaacagattttatttgccaaggccaaagtaactatttccttcactgttatataatctagtaaagaaacaaaagagatatttctcagcagataaaagaaccaaaacagtgtataacagtccttcctaacctttagcagaattttgactacttcgatctcctctacgatttaggcgcaaagatagagacctttgaagatcaccctccatatctgattctttcttcatgttatcatcactgccattgcataacaaaaaaaaaaaaagatgacattttggcataacccatgagactaaaaatcagaaaagatgcacacacagttatcaaaagcaaaactgataaagagaacgaaaagagggaaaaaaaaaaaaaactgatncagcaactaattaccccataagttccttgaaaatattcaaccaggacaaatttaaaaaccaaaactttgagcgaaaaaaagagggacagaaagggagaaaaagaatagggcgagacccaaatgaatattaagaatagtatagtgtcggtgaggagagcgcagatgcatacaaccacaaaaataatgggaagaggagtaacgagttggggcatcactatcaggtgtaaattgtgaatgaagtaattgaggaaaacgagaagaaattggtacctggcggtggtgaaagaagggatggttctgttgtcagtgaccaaaaagggaccagatctgtgtgaaatgtgtaatgttgtgttgggtcgttctaacaacaacagaagagataaactagaaagaactaagactgtgaagaagagatgttgaagtttcaaactgaaacagatatccctctatcctttgttttctcatcaacactcacacgggatcatcagaggatcatggaagctgcagaatctcttgttttattttaatgttcttttttttctctttcttttttctttactttcaattgattgaggaggatcaaaggcccaaaataagagggtggagcaatttggaatgggctgtaatggaactggaactagtatcccagccgggtttcttttgtctatatttttaaaataaaaaattaatatgaaagaaaataaaataaaattcgaaagaacaacaagcattttggttggttaaactttttccacgggcctaaacggcaagtagtagtcaatttggaaaaaatcgtatcagaattctgcagtttattttgtaagtttttagtttttaccatagaggtgatttgattacagtccttcgtttgttcttgtccattcatagctccaagctcctaatcacccacgtggctttgtgatcatttcatgaaatgccacaaagcgataaggtccttattacaaagccaaaatcacttggttgatggtgacaactggaatcacatggacttccccttaaatttgagcatcagataaaaatgaacgtaaaacgtgagcctctagttttgagttgaagcatataactttggggtgttcattgtgtgttgccactctcctctcttgttgtactcttgttccttttggttagcagaaaggaacatggaagctgtgtgtgctttttctgttggggcacttcacatcccaacagcacatgaaacatcaaagtcatttaggaaatctatattcttgagcaacctagtggcttcaccagtttcattggtttttctcaggggcagttcaaaatccaagcttttaactgccttgtcacccactccattgacagaatccagtaaccaacctgaggttgagccagaatttgaaagtcatgcagagaaatttgactggtactctcagtggtaccctttgatgccaatttgtgaccttgacaagaggaagccacatgggaagagggtgctgggaattgatgtggttgtgtggtgggataggaatgagggtgcttggcaggttcacgatgatgcttgtcctcatagattagcacccttgtctgatggaaggattgatcaatggggcaggttgcagtgtgtgtaccatggttggtgtttcaatggcaaaggagaatgccagctcattcctcaggcactccctgatggccctccggtaattactcttggtcataatttgtagttaatgcatgttgttgtaatatggctcccaaattcactattttttttgtatgtttcatttcctgtgtagtaagtagccagaacgcatatgaaaatgcagacttttcagcctttttttcaatcaaaagattatgatttgcatgtaccatttactcatttcctggccatgaattttagcttgtcatcatgatttcatgttctgaaacgtgcaatattgaaggtgagatcatattatgttgatgcgtggaacattagtggcttgtgagtggctggtggcgtactttctctctaagttcattggttctagatctcaccaatgcttcaaactactcttgacccctatgcatgtcacgcatggccacctcttcctcctctttttgttgatgtgaagttatgttgtagacttgtaatttgtttttcatggctctcttaatggaaaaggtatgagttacacctcccaagtttaagagtttccatctattctttacttgatgtgtgacaatctagtcttacataagtcgacttatccacttaccatgaccagaagttgacttgtacttaggaaagtcaacgtacaacattcatactcagttaatagtatatagacaacttacagaatacaaaagttaagcaactgacacaatacaaaacttctcatgtttcaaaaaagcaaatccaacttggtacatagtcagttatagtacatggtttagttttgtgctttgtgaggtccaattgggtaagtcagtacatgactcctacacctgaatttttttaacccttttagaaactcaggtaaatcacacccaactcaaaatttgagtttttttatactttatccattagccagatgaatgtatgttggtactttgttgaatggggtcttttgcccatttagtaaataatgagcaggttttgtgacccttatgaaactcaggaggtaagtcacatatgacccaaagttggactttcctttaaccaattttattttcaaaaattttaaatgcttccaagtttcttcatacaatgggacaatctgatgctcattaaagtttgctaaaaaaaatgtgtaggtacatacgtccaaaaaagcatgtgtagctgcttacccaagtactgtgcagaatgatatcttgtggttctggccaaatactgatcctcaatacaaagatattattacaagaaaaagacccccattcataccagaaatggatgatccatcgtatactaaattaatgggaaacagagacattccttatgggtatgattttagactattaagatctttcctgtgttgtagaactacacatctgtacgtggctcactttcttttacctgaagctactgaactattatttttttctttatttttttgtgattggtaattggtctaattatttagctgattctggaagatgaaaacacaagcatgacgttatgcatagaatttgcatcctgggggcgaaaaccacattccccacttagtgtatctttgatctttctaacaaaatgaatatgcaattttaggtatgaagtactgatggaaaatcttatggaccctgcacatgttccatatgcacactatggactaatgcgtactcagcaaccaaaaggtaggcatataaggtatatcttttttaacttaattaaatttctatttacttatatatgacacttacatatgtagagcttaataacagtgaaagctgatagagaagggggcaggccacttgacatgtctattgaaaagttagatatcaatggtttttcagcagatcaggcttgggccaaaagcaaatttatgccaccatgcattttttatgtgtatcctccagatcaacctgcctcatctggtgaaactaacgtaaaatattgagtagatgctatttttagatcagaaacaatatgcaggcagtatttctaagggtataatttgtgttacacttaatgcagaaatcatcagctaagaagaaaatgtgtttaatcttcgtttgtgttccggttagtcctggtaaaagcagattgatatggtgcttcccaagaaactttggattgtggatggacaaaattgtaccacgatggatatttcatgtgggacaaaacctgattctggattcagatttatatctcctccatgttgaggtaacgcctgttattatttatcctatcaactaattggttccatcactctactttttcctcttcaaactattgtaagttctgctgaataaagctatcataaagaggagcaacattttttcccactaggtggtattagctgcatgaattaaacgatgatagtgttttgttgtaaatgatatttatacacaaacagacaaactatttttattgggcttcctctacctctaactacccatctgatatactctccttattgggcttctataggtcttctcatacatgaccaaactacctaagacaagattgtatgatcttttctacaataggtgctaccccaagttttcccccaatactattataatcctatcttgtctagtatgtcatctcatccaactcaacattctcatttctgctaaaaaaactacgtacctcattgtcgagaggttcctcgctatgctaagggaagggagagagatattgtactcagctttacccttgcatatgcaaagagtctaactctcaattctgctacattgagtttattctctcgtttgttttttaccacccaacattttgttccatataacatcacaagttttatagttgtgtagtaaaattttgtttgagtggtacttttttatcacagataactcagggtactcttccatttcatttttcctactttaatcttatgatttatatctctctttttctaataaaaaacaataaatgaatgatattagttgttactactacaagtgtacaacaaaaacaaagtcttatcccactaggtgaggtcagttacatgaatcacataacgtcattcgacaaaattaaaatcaaagtttcagaactattattaagccttagatctcctttggtgatttcctccaacgtcctttttggtttccctcttctccttttccctaatctaaaaatcatacaatttactcttctaactagcacctttggaggccttctttgtacatgcccaaaccaccttaacaggttttatattgctactgttacatcataacaatataaaatttgataactgtggaatttttttcaatggattagattattcagcttgtctttgtcctgattaacttataaggccatttgcaatgaaaattttattcatagtagttgccaggttaacttttccttgcatttgtgtacaggttaaattttttaattgattttttatattaatctcttaaattatgatagattggttacccgagtttcagtcagtattacagattaggcttgctgaaaatttatattcttctaacttgattagctcaaacgaatttttcttagccttgggtgaacggatagagttttcaggttaaatgtaaactgtcaactgcacgttcatatttccaacctaaattaattttctgttagtctaattgttgggggattttgtcccaataatggctaaaaaataattcttattataatctgctgctatataattccacatgtgcttcagattttatgacagaatatctcttagaaaggtgaataatatcacttaacattgatgcaaaatcttaataatttatgtttcagcatccagttgccactggtattatgttctacatgtaactaaaatttggtacctttctttcttgttgtctggtctgttttattttcttcagttttaatgtctccatagaaaagtaatatgtccctggaaaacaatttaatttgattcctcatatttgtttgttaaattcttctgataggaacataaactaaaggatattggaccaaacaattggcacaaagcctgttttgtgccaacaaagtcagacgcccttgttattggttatagaacatggctaaggaagtatgcagatggtcaggttgattggagaggaaaatatagtggagctcttcctccaacacctccgagagaacagcttttagacaggtactcatttaagattgctcttgaacatggaagtttcaatatagttataaatagattggccatttcctttaattcagggaagagttacaaagagttagtattcgttttggtcctcggaagtggcaacttgtgttgcttaggtccctgaaaaatctatacagattagtctttggagggatagaattatttacaagcttaaaagggtaaaattgttaacaagttgacacattcaatgatcaatttgtgtagataggcactttcaaggactaaagcaacacaagttgttttgttgctttaagggaccaaattctatattaaatcaagcataaatctttaatgaagtccaccataatcaagaattttatcaatctaaaattcttagccaatggagaaagaaaaagttgttctgtactcctgtaactacaacgtaatcagcagagagaaattccatgctttaatgtgtgtttcacaaaagcagcttgatacctctgactttgagtatatatttttttttcctaaataattgaacaaaggcaagtaatcacaaaaacgaatttatgtcgtaatttgggtttcaatgttgcatctctatatctaacgaggtttcactaacatgcttgcatatgtactaataaacaatttttgaaaaattttgttttgggattgttgattacaaattaatttgagcaggtactggtcccatgtggtgaattgcaagagttgcaattctgcttataagagcctgaatgcggttgaagtaatgctgcagatcatatctgttgcttcaattgggattgttgccgtcatgaagcatggtacaatgtcagtggcaaaaagaaattcaatggttgccttagcagtactatcatttgcactgtcacggtggttagctcacttcatatacaaaaacttccgttatcatgactacgagcatgccttccgctgaaatgtgttttccatagttcttcatgtctaaatatgtgtatagactatagtgaaggtccactagaataaagtcactggcactttatttgactttttaaattttaaaagttaattcatctatgacaagtattcacaacctcttcatacagaggacaaataggttgatatcaatctcatgtaaatctaatttacattgtccgacataaaatgagtagaattgtagaaatattgcatctagttatgaacgtaaagtttgtgatcttttcccttttatatatgtatagacactaacacacaaacagatagataatgatatggctattataagttagtacttgtagttcttaacaaaacacagagacacctgtaaattagttggatggtacttgacttgatgcccaatagtcaagacggcagagaccaaaattctcggctttcgtcataaaatcaattcctaaatccaattaataagaggtgaatttgtttaaacttatttcttggaaaaatatttattttaatgaaataagtactttttttttgttttttaaattttttgtataaattacttttgcttaaaaaaatttaatttttgcttattttgataaacagatcctatatgcttatcttaaaactatttttttaagtctgaacaaaccagtccaatattagtatttgtcaataagaaattttcaaaattaacttcatgattcaaannnnnnnnnnnnnnnnnnnnnnnnnnnnnnnnnnnnnnnnnnnnnnnnnnnnnnnnnnnnnnnnnnnnnnnnnnnnnnnnnnnnnnnnnnnnnnnnnnnnnnnnnnnnnnnnnnnnnnnnnnnnnnnnnnnnnnnnnnnnnnnnnnnnnnnnnnnnnnnnnnnnnnnnnnnnnnnnnnnnnnnnnnnnnnnnnnnnnnnnnnnnnnnnnnnnnnnnnnnnnnnnnnnnnnnnnnnnnnnnnnnnnnnnnnnnnnnnnnnnnnnnnnnnnnnnnnnnnnnnnnnnnnnnnnnnnnnnnnnnnnnnnnnnnnnnnnnnnnnnnnnnnnnnnnnnnnnnnnnnnnnnnnnnnnnnnnnnnnnnnnnnnnnnnnnnnnnnnnnnnnnnnnnnnnnnnnnnnnnnnnnnnnnnnnnnnnnnnnnnnnnnnnnnnnnnnnnnnnnnnnnnnnnnnnnnnnnnnnnnnnnnnnnnnnnnnnnnnnnnnnnnnnnnnnnnnnnnnnnnnnnnnnnnnnnnnnnnnnnnnnnnnnnnnnnnnnnnnnnnnnnnnnnnnnnnnnnnnnnnnnnnnnnnnnnnnnnnnnnnnnnnnnnnnnnnnnnnnnnnnnnnnnnnnnnnnnnnnnnnnnnnnnnnnnnnnnnnnnnnnnnnnnnnnnnnnnnnnnnnnnnnnnnnnnnnnnnnnnnnnnnnnnnnnnnnnnnnnnnnnnnnnnnnnnnnnnnnttattttcggacataacgagtaactaacctgaataactaatgtgtgaacgaagaaaaggcaacaacaaataggaaaaaaaaagtgaagtgaagttttatgttttcttttatggctttgtgccatttggtttattatacttgttttatgttggtgtattaaattttaaaaattttattttgataattttttttaatttctgctactaaaattaatgtgtcattaatttttaaaaatgagtaattaaaataatgacgattacaaaatgatatgtattaattatctatttttttaacttttgtcattttttctacaaatttcataacaaccagaagataaacaatataatatagtaataacatacattataaacattagattttgaaggtgataagaaatttaggatctcatgttgcaatgaaaattttgagttttgcttccatttttggtttcatgactgtcattattttaatctaaaacattaaaataaaacttttaaaatttatcgtaacaattttttttaaaaaaaataaaaataaaaaaccaatgaacatagtaaacaaaagtaacatttaatcttggtttttatgacaagtgaagtgaagtaagtaacactctaacattacacagcactgaatgactcggcatcagattcagatcctccgtcgccatcacccctaacctgtagcccataaactaacaccgccacctctttctcttcctcaccttcagatctcaaaaaatgaaggactcaaactccagcaacagtagcagaaccgaacccatagcccaaaacatcatcaaactcattagcaacctcttcttctccgtcttcgtcttctctgtcttaatcttcaccgtcatagccataacctaccagcccccagacccatggctcgagtccaccccagccctaactaacctcttcacccaatcacaaaacgccactttccgaatcgactcctccgtcctcaaaaccggcgaagacctcgctccctcgccgcaagaccctcccctcccacctccgccaccctcatccgccgccgtcaccgaagccgtcatcgagaaaaccgaacagcaaattgccaagtccaccgttaattccaccgccgactccaccgacgcggcgcttccttctccccccgcctgcgacggaaccctaaactgctccaaccctcgcgttcgtattgctattcagagattcaacctccgcgcgttcaagtccattgccttcttcgactaccagcctccggtgaacggctccgtcgccggcgagtgcgacgtcgcgtggcgcttccggaacaagcgcgagcgctcctggcgcaagtaccgcgactttcgccgcttcaagatcgctgtcaccgacgactgcaggtacaaggtggtgcacgccggcggctggcactctggcgccaatgctcgccggaatatgacgcgctccggcgccgccaggggtggtcggaccctgccgccgcgggcttcagcccgcgatgatgagatcaatgacacgattccgactttgggatcggagactaattttaggaatgggaagtatttgtattactcgagaggtggggattactgcaagggaatgaatcattatttgtggagtttcttgtgtggattgggggaagctatgtttttaaacaggacttttgttatggatttgagtgtttgtttggcttcaacttataaccctagtaacaaggatgaggaggggaaggattttaggtactacttcgatttcgagcatttgaaggagacggcttcgattgtggaggaaggtgagtttttgagggattggaagaagtgggataaaacgcatttgaagaagaagattcctgttaggaaggttgtcaatcacaaggtgactcctatgcagcttaagaaggataagagtacgattatatggaggcagtttgatgcgcctgagcctgaaaattattggtatagggtttgtgaaggtgaggctgctaagaatattcagaggccttggcatgctgtgtggaaatccaagaggttgatgaatattgttactgagattagtggaaggttggactgggattttgacgccgttcatgtggttcggggagagaaagcccagaacaaggagttgtggcctcatttggattatgatacgtcgccggatgttcttgttgagaagcttaaagggatggttcagccttggaggcatttgtacattgccaccaatgagccttattataattactttgataagttgaggtcaaattacaaggtgcatttgcttgatgactataaggagctgtggggaaatacaagtgagtggtataacgagaccacacttatcaacaatggaaagcctgttgagtttgatgggtacatgaaagttgcagtggatacagaggtcttttaccgtggaaagacatgcgtggaaacgttctataatttgactaaagattgcaaggatggagttaatacatgctgatcaggttggcactactgatttggatgctttttcagaatacatggtacactcgggccttgcttttggattcagtttcagattcataccattgggttagatatgagcttggtattgtacttgcttgttcttttattatattgatgatttatgttgattatcatgattttgtatacatactatagaatccctttctaccctctttcctttctgttgactcaagctgctaaaaatccattctcgtattctttcattctcttttctcatttgaataccaaattgaaaattaagaagagtttttgctgaagcctttaagactctatttgtctatgaccttcagatttgggtaatggctctgctttataaattttccaagttatatagtatagtgaaatactaaaatatattcaatgaatgctcacatagtcacattattccgtctttaaatacattgttgccctgatgaacttccaacataactttttgacctcaatcctacgtaaaagttctgcataaccctaatttgtgtaccccaattctaagttctaacttcatctatctatatttccttcacttctgtatttatgtatttggaataacttatcctttttgactcctaggaatacccattttagtcgcagacttcactccatgccacggtccactgatgacactactttgagttcattcttataccttgaggatcttttttaggcaatctatatgaaaccgttggttggatgaatctttttttccttgcacatgacttgtcaacatccccacaaaggtatgttttattgagattacaaattaatctaaatgtattccttttaatgtgtggcacctctaatttggtgccacctctagttcatgtttctgcagaaacaaaaattttcaaattagagacatagccgtgttttagaaaatgaaattggtcgagattccttcctcatcattcgtgtttaaattctgctcgtttgataacttcacttttctgattttatgatagtgattagttgtactctgattttctgattaacttcacataccttaaaaacaacaatccaaacagattttatgcatgatgtccagtacgacacacatagttggtgttaacctcctcactacacagtgctttctagtatttttcaaaccattgcattcgtgtgccccaaacaactattgcgttaagatgcgatagaattattataacaaaagaaacaacgaaagataaggtttcttttattttcgatcctaaagatgttggcatggcaagggtcaaggcaagatacgacggtatgaaagagaaacatcataatcaagttggttctcagtaagcaaactgcaaatttgaaattgagctaatataacggacaaaagctttaacgtactatggcttaaatactcgaattttgctttatcaatgaacgtattttattcactcaccatactttgctttatcctttaacattgtttggcttaaatacatgtatcgtttttatcaaatggggtaaagttgataatactcgttccagtttatataaattatttagctgataacgtactattatctgaaaggtcaataagcaccaaaaacccaaatcaagaacaaattgaatttgagacggcaagtgagggaaatagaaaccatgttaattgtatatcatgctacaatttatagaagaatgaaaaaaagatcaaaacccaatgtcaagagtgtcactaggatcactacaaataagtgactttcagtcattcagactattcatcctcctggctgcgtaatctggccgttttgtttgtcacaacaacatcaagttgcgcggctctctcaactatatcttttctctttcttgtggatatattgtgggcaatctcagcacagtaagtcctaaaataaagacaaataaagtggtcaggaaacattagatgcaaaatgatcagaattgaaatactaattgggacacaacgttcacctgttgtgcatcatgagcagttccaagtccttcacattgtgaacaacaaatttcttaaaaccattaggaagatagtggcgggtcttcttgtctgaaccataaccaatgtttggcatcagagtgcatcccttgaactttctcctaacacgggaatctataccctttggcctacgccagtttgtctgttgaataaaaaaatagaaggttattagttatagaccctagtataataatttcatagacaagaacaatttgatctgcaatctcagccgaaagatggtgatattaggataataatcacagacaatcagcacattattgaaatgtcatcacagattgcagatcagactattttctggtaaaacaaaaagtattcttaactacatgtgcaagaaaagtattaataaaatgaaaacgatttttgagatcaacataaaggtattcaagagatgtaaacaggaaaatagtaacagaaagcttatagtagtaaagaaagccaactgtgtcgcaaggcctgtaaaaattctatatatgcccttaaaacgagatgtcaagctacagctagacaagagtccaaagtctggacatcagataccatgggcaaataaattaacaaataaattcttaatttaagcaacttaaagataataagttataatcactaaataatcaaacaaaattactcaaccgtatgaaaaggatggcagagatcagatggtagtgcatgttagtaatcatcattctattgcagaattgatggataaagatcatcatatctctttacaatcgcatttcataatatacaaataacaaatttaagtggaaatttattcagattgaaaagaaattactaggcaagccaatcaatgcatattaattaaaggatcagacaattaattttcaccagagtgcaccaatggagcaagtaagactgggtgtccaaaaagttaccatcaaatcccatgctcaaattaaaacaaaaaacaaaggaaaactgtggcaaacaggaaacaaatcaacatcaataaaaaccaaacaaagcaccaacaaaagtacaacacaaatcatatatgggatcagatagtcgatctctcatcacatataaaaaatatagtaagactgggtgtcaaatttatcctcctatcccatcggtccaaaacaattgagacttaaagaagcaaattcaaataaaattgacaaaaaaataacaggttgaaataatacagcagaatcagataaaatgtcaatcaccatcttacaccttgtggtgcaaattaagactggggcgacaaagtaatatcatcatatccttaaaaagcagcaagctactacgacgaaacgcatatcaaacaattaactaaaccgaaaataaaaataaaaaagctcaacagctatatgcaacacaaaacaaagtgtaaaatcacaaaattactcatccaaacgatacatcttaaattaatcagaatgaagaggctaaaatgtatactaccttgacggaaattttcctgtcactctgaggcctcttgaacttcttgaccctcttcttcacgatcttcttcgagagtagaggtaccgccattttctcttaagtgtcttgagatgagggtgggaatagagtagtagtatatataggcgctgcggcgtctagggtttttatctcaccataacggagtgcgtctattctagggttttttggatagggtttgtttggatggaggtaaaggtaaatgggttgggccaaaccgggcttaggagtaaagaagtccaaccaagtaaacagtgataagttttaattggcccagatcattcaatactttcacttattcctttttttagagtaaactcagtaaagtaatttttttctaaaatattttcttttcattttgtgactttcttttatatttttcatattttgaaatttgagtaattttttgtgtgtagaaaatatttttttagttctttaaataattatgacctaatgaaatatttgtcatccttcaaacaattttgatataaatttattgacttaaatatatttttaatctcttaaatatgaaaatatacctattttaaccctttaaattaaaagttgtttttttttagttctttaaattgaaaaatacatttttagcccttctctataataatattaaataattaataattttgtagtcatttttagttgtcaaaatttaattttataatttaaattttaaaatataatttatgtgaggttaaaaccaccactaattggaatatatcatcaaacatatagaggaaaagattttcgcaacttcctcgatctcaacaactttggcacatctatcagcttgtagattggagaagaaattttcgatattttactatattatgctctacttacctggtggaataggaaaagtgtttttgtgttttgcaagtgtggggacatgttgtggcgttttgataaatatttataataagattcatctagttatattggttgcatatctaattttgcaggtgatttgtagtgcagtggcgagggggcttagtgctccgcgttgtaaatatcctgttttaataaaaggaataataagattaaaatggtcatttactcagtagatatatttattttcccttattttatttcttatcaactaaccttaattcaaaaaattcattctaccctcatctaatttaatcatatttcttttatttattttttctcacctattctcctttctttcctcctcacaatcaaataatttcttagaatcatcacagaaaatatcaccttatttcaaaatgaattgacgtaggacaggaaaatagttagagtattttttggatgaataccattttttttatgaaaaaaaaaatagctggagttcaaataaaagtatcatgtatctctaggttgcacccagaaatataaggagtttttaatagacaagcagtatcaatttttatattattaaccaaaaaaaatttacttttaaattataaaagcagtgaaaaaactttatggggaatgcattatttaggaattatgaataaagaaattgaaagttgcatttattcacgcacgggaatgatgcagatgtgatgttgtccggttgtaataactttactgggcagtgtttgggacagtaaagtgagtgagactttgcacactgttgttgcctctccctttcttcgccaactctttcacattccttccttttcccaacaccttcacattgcaacctaaaaatctctcaattcaacggtttccgctttcagggttttagcttttgctacgtgttggtgtggtgaatgcactttcttttctgcgcgttccacctctctcagctagtgttcagtgttcattatacccacaacagaagagtagctactcaacacaagctctttcggggtttttaagaaagatcaggtgcacagtccgcgcttctattcctttctttctaaacccctctatgagggttaggttattatgcttttttttgtactaaaagaggaatacacgcttctctctcttctccattttaagaaaaaatgtctataaacggcaaatcttttagtatttatttatttatttttgttttaactgggccttgaggtgtaccatgtactacctatttggaaagcttgttgaatatggcactgttcttactagatttgatttctgtgaacatcaattttatgtaagagtagatattgttcattaatgtttcatccaactagtggacttcgtttaattatctgtctgtgttatgttggtcatttattgctcaaaatgtgatttcgtgtttattgctcaagttttcagctaaggctttgctggacagcaacattgggctgaaattgctgattcactcaggtgatattggatgtgatgaagcttaaaacatggcttgcgagagttttgttgctcactattgctgtgcttaccactacattaggtaatttataccttcttttttttccatatttgtggtgaatatctgaaattgagttttcaaatttctttgttctcacgatcagtctacatactgtatagtctagactgcttttgcagttacaccgtgtgtcaattaaatttggatcaaaagtgtattaaaatgaaattgctgataggtgacagccttgccaatagtcatgcattcataaaaaaaattggcctaaatagagtgaaacttatcctggaaatggcattggctttgtcagattggatttatgtagtttatgttgcctcctcctggactccttatgctttggtacttttcattgtctatcagattctgactgtaaagtcactagtgctgcaagctgactgccgagtggaccgagtctcttgtgcttgcatgtgcatttattatttattaagtacaattgatgaggtgtttcatgtattattggattgggtttgatagttgcaagcaagtattttacagtcaaaactattgcttttcttacataattataatgaccatatgtcttgtacgttggtcagcctgtttatttttctatacctgttatgattaccacaaggggaagcaattagggatgtggatgtatgagtatgacattgactgtctattatctttttgagttgatggcttgatgctagatcaaattgtttaacttgtaggtgcctttgtgggggtaaacattggcactgatgcttctgatctgccatctgcttcaaatatagttgacattctacaagctaatcaaattactcatgtgcgtctgtatgatgctaacgcacacttactacaagctctttcaaacactagcattgaagtaattgttggtgtcaccaatgaggaggtactgaggattggagaatctccgtcagcagctgcagcctggattaataaaaatgttgttgcttatgtcccgtccaccaatatcacaggaatggcagttggcagtgaggttctttccactatcgcaaatgtcgcccctgttctggttcctgccatgaattctcttcacaaagccctggttgctgcaaaccttaacttccgggtcaaagtttcaactccccagtctatggacattatccctaagccttttcctccttccactgccacctttaactcttcatggaactctactatctatcaactccttcagtttctgaagaacacaaattcctcctacatgttaaatgcctacccttattatggatacactaaaggagatggtattttccctattgaatatgctcttttccaacctcttccttccgtgaagcaaattgttgacccaaacactctatttcattataacagtatgtttgatgctatggtggatgctacctactactctatagaagccttaaatttcaataatatacccattgttgtcacagagactggctggccgtcgtttggtggagctaatgaaccagatgctactgaagaaaacgctgagctctacattaataatatgattcagcgggtcatgaatgattcaggttctcctagtcagccaaacatagccattaatacatacatatatgaattgtttaatgaagacaagaggaatgggcctgtatcagaaaaaagttggggcatcttttataccaatggtagtactgtttatccattgaggtttggtgcttccgatccgattgctggaaattcttcagcagttttttgtgtggctaaagatggagcagacaccgataagctgcaatctggactgagctgggcatgtggacaaggaggagcaaattgtgctgcaattcaacaggggcagccatgttatctccccaataatgtgaaaagccatgcctcttatgcttataatgattattatcagagaaagcatagcagtggtggaacttgtgactttgatggtaccgctacaattactaccaaggatcctagtaagtcgatatgacttcttatttctgttttaaccttgatattctgatatgggacgcttgtaacacttcaagttatttctttggactattactcatgtaaccattttttatttcaaattgcgtactaactgttgtaggaaatttcccacaatccctccttgttagaaacaggaaaacagcccctggagagtaaatcatatatttgaaagtcattggtcgttgttagaaagcaattacagttataaaaactattcaagttataagcatataccaatgtgcttttcaaattacacaatgacacatctatggcttcactaaaagttgaatttgaataaatacatctaattcctcccacaaaacatggctggatgataaaataatggattcgtagtgtctttggttggtgatcatgtccctatttggcatattagcagggcaagaaagcagttgcagttttttttgatttgaacctgaagatcatgtttagtcaaaaaaatattagttacattacatcgtttagttacttaaccaattaattctgtgtactttgttgcaggttcttcatcctgtatatttgctggaaggtatagaatcttaatctttatacatccttgatttattagacttagaagtagtaattgtgaccttttaaatttcttatatgatcatggaatattttgacagcagttctaactcgagcactggtggattgagtttacctccaatggcacttggaccttcaggcccctttggtgcgagtatgaacatgcaagtgtctagccttaactatttgatatcagctattggtgtatttttggctctggcggtgttatgaccacaaggtcgatgctctttaaattgcaattcaatgattcgtgtaatgtggtcctatcgattttgtatctagcttttcttgggtccaatttattcttcagagatgtcccatcttctgcatttggggtcattgtaatttatcacacttttaagatagttatttaatgtagtgctttagccatcagaggagactaacctaatacggggcccttaagaaatgactgccagcttctcgaaccaacaaattatgcacttgttgtgatcataaaaaattagagtagcatacaatttatttgaactattaataagaaaaggtgtgttcagttgaacaattaagaaaaattagcatgagatctatgaaatattcagtagcttatactatatatttatatggatggaactacgaagagtttgtaagtacgaacatacgggtgaataatttttctttaccataaaataatattaatattcatgttgtcttctttaaagtctaatttaaaattggtaattattttttatgaattttttttctaactcaatgatggcagcttacaaggcattcagtgcgggtaattgagtctcaatgttttttagtaggctattttcatcaatctttgtttcctttctgtttgctgcttctcctttccgaacaacagtcgtgaattacctatttatggccgatttatttatttacaaaattaatcatataaaatcaatatttttttttataaaaatcttggaagcaaggatagtgaaaaatttatttacaaatttgaaaaaagagggataagaagagtaaagatattattcaagatagatgtatcaaggatgaaaataaaaaaaaacttttggtaaggaatgaagatgtaagtaaaagatgtttaaactactttagtaaattttttaatgagaatgacgacaagagtgaggtggatttggaagatattttttatagtagaagatttgtatgcataattaatacacatgaagttaaggagactttaaagaggatgaataataataaaactttgggacccgattacgtccatattgaagtgtggagaaacttgagtgatgtgacaataaaatggttgatcaatatttttaataaaattcttcaaacaaataagatgtctgatgcttataagaaaaatatgtttgtgcttatttacaaaaataagaaaaatattcataattattctaactataaaggcatcaagctcgtgagtcatactatgaagttgtaggagagagttattgaacaacgcctaaggagggagaccaatgtttccttaaatcaatttgaatttatgccaagaagatataccatggaagttattttcttgatgcgacaattaatggaaaagtataggaagaagaataaagacttacatataggattcatagatcttgagaaaacgtatgataacgtcccaagaaaagtcttatggtagacaattgagaagaaaaatgtagcattaaagtatgttaatgcaatcaaggatatgtatgatggggctaccacatgtgtagaagcttgtaatggaacatcaaggtattttcctatcacggtaggtgtttactaaggttcagcttttagtccttatctctttaccttagtgatagatgaactgacaaaagatatttaagaaaaagtgtcgtaatgtatgtttttttgcagatgatattatgcttattgatgagatcaaatatgatgttaatagaaaactggaattgtagagaaacactttggagtctaaatgattcataataagcaagagcaagacggagtacatgaagtgtgagtttttgcgggtaagagatgatgatcaagacacagtgcaactacgtggtcaagaggtacccaaaaaagatgtttttagatacttgagatcaattttgcaaaaaggtggtgaagttgatgaaaatttaaataatagaatcatatcagagtggactaaatgaaggagtgcatcggagtttttgtgtaaccgcaaaattccccttaagctaaaaggaaaattctatagaataattgtaagaccgacaatgttttatgatgtggaatgctgaccagcacataagcaacatgtgcataaaatagggttagcagaaatgaggattgtaaggtggatgtgtgtttatacgaaaatggataagataagaaatgaatatattcgacgaaaggtaagagtaatatcggtgtgtgaaaagatgagggagtatagattaaggtggtttggacacaagacgaccactggatgattatgtaaaaacaagagtttgttaccaagagctcaacacaaagaaaggtagaggtagaagtcgaccgaaacttacctggggaaaagtaattaagcaagacctaatgaagtgagatatagattgatggagagttaaacccgttaatatttctatgttttttccttgttttttttttagttctttgtctctttattttttcctcctcctttcacccctcttttatgttagtttatttttcatatcttttgtcttcttttcactttttctttctctgtgtctttctctttctttgtcttattttttatttatcattgaatttatctatcactaaccataattaacttgagttaaaagtattattaatgttgatgttgattgcacaaactaaactaatatattaaataagaaataaaatactactacttaataagtgtcttaaatacttctaatttggataaaaaaataattgactaatagaaaggtcaaaggcttttattctttaatttaaatgtataaattattgtaaaatggaaaataaaacttgatatattaatttattttcataaataagtaattgaagtagggtcttgctaatcaatgtcaaaaaaattataatcaatacaattttgtgtatgttaataaaaatcttataaataatataattttatgcattttaatataatttttttaaatttcttaactgtactagtcagcatttttcatataagtattttattttgatagtaattttcagtaagcgtctctgacaagattagtgcagcaacaacaaacagcctttgggaaaccaacaccactaccgtgcaacagtcaaaagctgaagcgaaaataacaagtaatttgtctgattgtgaattgtgatgcgatcgaatcggagcatggagggaggcaacagaaatgggtacgcgtgggcagtatctgctggattcaacgccgctcttgcagccatttccgttaagctccctcttcaccaggttaggttaggttacattcagattcgccttctaattttcatattactgtaatttctctttcctttaattgaatcttagattagatatatatatatatatatatatatatatatatttatttatttattagtttgtcaggtacgggatggtgttattgttcaatgtcaccatgtgggcttgttatgtcaacagccttaaagctctctcctctcttcaggcaactgtcaccaatttcgctaccaattttatctcttccggtttagccggtttcttcttctttcacgaatcactctctttccaggtatactttctctgatcataatgttgttatgactatcgcttccaattaatacaccctctcaactttggttcatttttatacttttaacttgtctggaggttactccatttgcatctcatttttttttttttattagcaaatgttagaatgttagtttttgttagcagaggaatcaaatccttgcctttttcccccgtttcttctctcttaaccatctaacccacatgatcattttaaaccatctccaaaactatatgttttattattgattcttgttaatgattttagactcttcaatttcaacatttttgaactattatatctttcgtttgatcttggaaaccaaacactcttcccatcaactggaattgcttttggattataagaagtaatcaggttaacttccaaagtgcttcggagttttttaattgtggggatagtaattttggtgtcaccttaaattgagctgaaggaatccgggatgagtttttttttttttttttgtgtctttgatacaattttgcacatcaagtttatctttgggttttcattttcaaggggcgccaaactgatgatccttaatgttgttctgctttttagcactaacagagtagaggaccacttggtttttctgtctgttactgatgcttacagtgctaatgctaaatgactaaaccaccaaagaactcatggccccggttatttgcctcttacgcattcaccttattgattcatgcattttctgatgtataaactgttccacagtggtttgcaggtgccatacttataataattggtgtagtaatacttagcaactcaagtattgagaagaaggctagcactgattaggtgttacagttcaactcaataccttttaggcttgtttgttcaagacggaggctaacatctgcaactgcatggaagcaaaatttggacaagaacttggaaatatcaggaatagtaaagttagatagtttccagggcagttcaattgacatgaaacaaacacagcgaaaatcgcttcttgccttcactgatttaagaactcttgttatatatatgtcattcaggttgaggaattgttattagccacaagcaacttttggttccaccattctatggctacttttttaaatttctatttgtattgggatctcaaggttcaatatgctatatttatggatgtcgttcaaaagttacgtgcaactacaagttttcttgctgatcgaactagctctcctgcctatccatttctatgaattcagtcgttttagtaacaatgtaagtaggattttacatatgtgagagtattgctgcccatctaataactcagcatgacatgcgatacaccagtgctactggtgagatttctgcattagatgaccatgagatacaactacgagtgagatttgatggtaaaagagtgttatagattggatgtgactgatgaggctctattatatttgctacaagaggatgtcttttttgggataagatggaacacttttgagtctccacttcataaagcggtttgatttgaggtgtagagagatgaatgagataatgttgttaaatagcattaagggtgtcagtcaaactccttttggttagattttcctaaagcacaaaccaagacaattggtatttttttttataaatatttaaccactctaaattattcttatgttaatgtaaaaaaaaatgttcttctatttttaattaattaatatttaaaatatgataaagaaagtatcatcagccattcactgaatttattaaaagaatttctttaagatatccaaattccaaagccatatataataatcgagtaaattataattttacttcttgaaattatgagacgttgttataatagtctatgaaattagaaaaatgtttaatatatacttaaaattaaaattattgtcattttaatctggacatatacaagtaactatctttataatctattaattttataatttactttcattgtagtctctctaacaaagctagtgttaggatgaatatgtgactaacaaatttcaatttcgagaattcgtttgacatttttttaattttaaggatttttatgataatattttacgattttaaggactaaaattgtagtttagtttataatgaactatcatgatttatttaaccaaaaaaaatataattgtacaataacactagcatgatattttgctaaaaaaaattattaacaatatatttaaaaaggattttaaacatttaaaaaataatgcttttttattatgaatttaaatgaaatttaatgatgtaaaaataataggaagctaagtgagtggatgaaatgaaacctttgggtccttggcttgtgggaataggagagtgatgatgatatcaggaagtggaggaaaatcatcgtggagttcatcaacatcgtcatgggtacccacaacctcgcggcatcgggaaagaggattcagagggaaatggtcgaactcaacaacgaccctcctcctgattgctctgctggccccaagggcgataacctctatcactggattgccaccattattggaacccctggtagctgcgtaaccctattctattactattaccattactatcactatgaatatcatgtttataataggtttcttctttgcttgcaggaacaccctaccaaggtggcatatttttccttgacatcaaattcccaattgattatcccttcaagcctcccgaggtacatctctcacatacacttctttcaactaatccatttcatattttcttgtataagttgtttcaatttcacgtgtatttcgctcatatttgtttgttttatgactacatgtttggaccatgtcatgtcttaccaagcacctaggtcattcaagcagacagtacatatgacttgctccatcagcttattaattcaattttgcaaggccatggacttgtctttgtctgattgttatgtttcacattcagtataagggctcaatctgacacttgagccatgaggctctccgcccaaataggctagtcttttgggatggactctcgtttggggtttgagtcataattgatgtcaaaggtaacctgaaaaggagtgattagggaaatgcatacctgtactataagaatcagaataatagactagtctttttggatgagtttcctcacgggcttacttaaagtcaagactagggtagtgtcccttcaggaaaagcaaattgattataaggaccattcaactatgcaacacccttgtgcaaataaggatatgaagtgtaattcttggaaaatacataatcgaatgtttgtgtcactttttctttccaagatatataactactagatggtgtgttattgtatttaacaattttgatatgtattccaagatatgcagacaaaccagaaaatgtagagcggttgaagtactttcattgttttttaccgtcttaaattaaataattgagcttgcaggtagtattcaaaacacgcatttaccactgcaatgtagaccctgatggccgtgttagtgtgggaatgttgaaggatgattggagtccagcgctaacaattactaaggtgctactagctgttagatcaattttggcaaatcctgatccttgtaagttcttcccacctcttattttttccattttgtttatataaataggggttgatgatggtttgcatgttagttctattcttcagccttttgctttcaaatacagcagtagaggcagatcttgttatgtgccttgttttggagaagaagcacgttttaacaggacaccaactaatggtttatgtcttttgtcgctttggattcaattaacttagggggttgtttgatttgggaatacattttctgttttatttcttgtttttacaaataattaaaaaaaatgttaccttgttattgcttggtttctttttttaaaagatttgtataggaaacaatgacacttttaaaatttgttttgttttcattgtttcctatggaaatctttgaaaacaagaaattattcctacatcaacttcttacaatacttttaacaactaattttttctttctatctttcttcgtcatgcgactcatcttatctatcccatacttctcttctcttcctatctctttcctaatttgtaaaaaatgttgtggtagtagaaatctcctttccaaccatgtaatattagtgatgccaacactttcaatcaatataacaagtaggcatttatgatttatgatcttggagtgtaaagatgttatcattgttgcagataattatgctgttgtccctggcattgctcacttgtatttgggagacaaagcaaaacatgatgatattgctgcagagtggactgtccgatttgccaagtgaatgggatacaagtgccctttggttggcttacatcttatatataatgttccaatatttatgtaaatgagaatgatagttaatagaagtacgtagtaacaagcttatctcctccttgctcgctgttccagagagtgccttaattgattcgtcataattgtaagtggataatgataatcatgacatgctgtaaattattttcatagttcttgattttatttattttgttttattaagtttgtttatttaaccaaatttcaggaaacacgtcaaacattgttacttttagggattccaaagttattgagttatggatgctatttgacacagtttgatgatatctatgaacagcaagaatgatcatgtatttgagaagtatgaaatttagaactgttttcgaaagagccttgacatgcattgaaaatggtactgaattgacatttgggtggggtggatttttctgcaaatagttattgtgaaaaatccataggaaacttggtgagtttcttgtggatatagatctgtaaaaaatctgctggaaaattcaaagtttcttatagttttattttcacaggaaaaaccatatgttttgctaatgtcataagcaaagttgcaagaattttttatacagaaataatctgtacgaaattgataagatttttttagtaaaatgtactcgattatatggacatgatttcgaaaagttgcgataactatgttatttaattgtgacattattatttcaaacttattatttgattttagggttggaattaaaaatctagaatctgttaacttattatttcgagcatttggaaataaataccaaccagctagcttatgagtttaacttcctacatcagtgttttttctaatacacctaacatattttttttattttcaactttaccctcatatgaatcagcaattcgtatgagtcatatggattggcaatccataggactcttacggatcaataatccatatgactcatatggattggcaatccatatgacttctacggatcgataatccgtaggagtcatacggatcgacgatctgtaagaattgaatggtgtatgtcggtatgtaacttacggattttgaaaagggcaaaattgatattacattgtgcatgctgggtgtattagaaaattagctggtgtaaaaagttaaactcctaccttatttattatatattaacatatttgagttgattatttttttgtctttttctagatagacttttcttttcaacacgaaatatggtttgcataatgcatgtgtattttgatttagtggaacaagtttgcatgcatatgcctcctgacttgagcaaactatggatagtttgttgcttgaaaaaatcatggtataatttgagacaaacacctattatattggcaaattcacttaggataactatatttgggtaaaagtataagggatacagtgaaatattttttttcccatcatctctactatatatatagatctctaaatacgaatctnattgtcagttcgtggtaattctaaagaaatttctcttaataataaacaagactaattatacttgtatttcgtgagattcatagtatgctcgtgtttctatttaaaatggcgttcgatgctaatctaatactcccactgtgattaattataagacataatttattagtttatgattataatatattttttcaatttctataggagagagaaagaaataattcatgatattttaataaaaaaataattaatatataataggaatgaaataaaatcttgtaataaaggataaaaaaattatttgactaattcttataaatagaaataaactaataaaggaagtaatgtctttcatgtttatacttagaaagttaatactacttcttataagtaaaaaatgatgttatacgttgaatttaaatataaataaaattaattatttttgtcatatttaatgatattatttttaaaatatttttatttaattttaattttattttttcaatgacttttttattggtgataataaatttaaataaaaaatattttaaagcctaacaaccacccatcaaaaagagttaggtgacgtgagcgagcgcactccgtagtcaactttgggaactgaagctcaacaaccacccatcaaaagcctttaactttcaagttggaaactgctgcggagacacagagagagagagatggggaagagcgtgcgggatttgggagtggaggatttggtgaatgcaggaggcttaacagtgtcagaaggcaatgaattataccatgctttgagggatatcctctctgagtttcagtctccttcacacatatggcgccaaattgtcactcggagactgctcaaaccatcttaccctcactccttgcatcagcttctctactactctgtttatcactctcaacattcttccctcccactctattgcttcccttctctgtatctctctcttactatgccttatcacttaccactacctcaacacaaacgctaattcatctttcattttttgctttttgatttcagagagcaatccaaacacaccaacctgggccgtctcatggaaacccatgcccctgaccttttaggagcttcctacaaagaccctattactagttatcctctatttcacaagttttctgttcaacaccctcaggtaagcctactaccctcccacctctaattcccttttttattctagtattgtgttttcaacgtgtatcatttgtttgtgcagctttactggtcccttattctcaaggaactttcagtttcctttgttgaacctcccaagtgcattttagatacttccgacccttctaaacatggtgggacttggctccccggttctgtcctcaacattgccgattgctgtttgcaacccagttcacacccccacaaaacagatgacactttagccatcgtttggagagatgaaggtttcgatgattccgaggttaatcatatcacgcttaaacaactccggcaccaagtgatgtaagccattcaagttacactctcgtttttccacaaaagttatgttaattataggtagtctgatctcttgattttttctttaaattgtaacttgtgctaagtcagttatttaaatcatttaagagatatttttcaattgcatcattgcattgagttttgcactgttgattttgtgttaatgtatatcattttgatattctttgtttcggctcttttcctacttgtgtcttactttatatgatgattttttttttcctgttgttgccatatgatttccaggttggtagccaaagcaatagatgccacattctcaaggggagatgcaattgcaattgacatgcaaatgacagccaatgccgtaataatctatttagccattgtcctagcaggatgtgctgtggtctcaatagcggatagctttgcaccaaaagaaattgcaactcgactccgtgtttccaaagcaaagggtattttcacacaggtgatgtttcaattgtaaagcaagctactgttgattgaaatggaaccattcaatatttggaatgtctctgttctttcttacttatcatttgtgcaaataatactatttagtatgcttgaagcaatgctaacgttactaaatctttattatgttggagaataaatactgtcctttcaagttcccttggaagcttaagcatctatattaggcatttcttgaaggtttcaaatttaaatgcctggaactgaacacaaatattatcttcagaagcatgcatcttgtgttgttaaaaactccttttgcatatattagaagcttcaaatttatagcattggattagatacaagcatttatacaatcaatatctgataaatacctattactacagccgatgcgaatgagtagaaatataaagggacaggtagggccttactggattaatgatcacatgagcaagtgaagcgagggaattttttgtaagttgtaactgctagacaactggcagaggggaagaggaatagttagcattgaggaatatttgaaatctgttaaaaacagggaagagtgggaattgggaggaggctagtcccttgaagtgctagcctagttactttaatgttccgtttctgtaatctctggtttaattcccggtattgtgcaatattagacttaatttctatgaatctccaattattttagtaacaaattaagattgttgtattttactcaactttattttgttttcaggatttcatagcaagaggtggcaggaaattccctttgtacaggtaaacaattgttatcattacacccatagctacattttcagcagtttaacttctaaatactaaaattgtattttaaattagccaagggttctgatgcctgtgtctaatttatctgttcagattatggtaggcatgctaagtgtaatgcacacgtcaagcttatttcctgttatacttaacttttggaacaattggcaacttaaccttcattgtagttaggttatttcatattcatctgttgatccgtcctttgattaatgtttcaatactgtgtttttacttaatgtttctgattttaaattcaatgccatggtcgaaatgatggaaaaatgaagtgttgggattactgatattctatttattttgtatcagaaaaatcccagtgttagaatataagagttaatctgaaagtaagtgatgttaaatcatcaaagctatgttgtatttcaggacatgtttttctggaaccctgtttcctttttctcattttctattcacttatttttttgtgtatgtgagaaaaatagtgtcacaaatgactggtttcatcaatgaatttatttttctgttataaatagaaaattcatgttaaacccaaattcccaatcataataagtcttttgcacattaacaactcagatgctaactcaaaattctatatcataaatacgttactcttcttcatgctgatgtttgtgtagcattccatctaacctcttcctatcacatctcccaaatcctgcttgaatttaattattctacttgcaatgtctcatttcttatatgagtacttgtaataataaacatgaattagttcaatatcttacatgcatgctttctgatatgttgattattgttcctggtgctagttataatctctaaattatatctaaacagacctctttaatggtaacaaaagtaattaactgtggagtgagatgcaccaaaggtagaagccagctctccctttacttggttcactttaatatatactgattccccaacttatactgacttaaatgccctctcagattgctttgctgtccaagccttgtaaagatgaaatgtttcaaccttggtagtgctcatgtttgtatgtttgttaaatagatttatggctgttctttaagcacatagaccatgtttctccttgcagtcgagtcattgaggcggctacatgtaaagttattgtgctccctgtgatgggtgaagatgtaggagtacaattaagagaacaagacttgtcatggaaaagttttctctcttctgccaggtaattcatactgcaatgtcatcattaaacaatatcataatataaacaaatggtcatttttggtgactaaaataatcacttctttagatcccagaaatggaagagagaaaaaaggagacagaaaaagaaagagaagttgcatttttttcttgtgctttctctcatcttaacatttaactcttggcaggtcagatcattactctccaagctatcaatcagttgattctatcactaatatactattctcttctggaaccacaggtaaagatcctctcttagaatatatcagatagaaaataccattgtactgattttctggttatattttgactttcatcaggggatccaaaagctattccttggactcaacttgcaccaatacgaagtgctgctgatggatgggctgccattgatattaaacctggagatgtgtattgctggcctacaaacttaggatgggtgattggaccaacagtattgtatcattgctttctaactggtgcaactctggctttgtaccatgggtctcctcaaggtcgtgattttggaaaatttgttcaggtaaattccccaaaatcttatattattttttttttacatcttttctatattttaatcacctaaaaagttgggaccacacaccttaatgtaaatgctgattagtaattagtgacatcataattgccatggttgatgtgtattgtattctgcatcaatagagtttgatactttgcaccaaagcacaaccttattgaactacaattgttcaggatgcaggtgtcaccattttgggaacagttccaagcttagtaaaagcttggaagagtacgcaatgtatggagggcttggattggacaaagataaagtaatatctgtcagtagtgtaaataatcaagttgctactaagaaaaatgaactgaactatggttatatgcagaacattttgttcctctggagaaacatcaaatgttgatgatgatctatggctttcttcaaaagcttattacagtccaattgttgaattgtgtggaggcactgagcttgcatctagctacattgcaggaagtccgttgcagcctcaagcttttggagcatttagcacagcatcaatgacaactggttttgtcatttttgacgaaaatggagttccttatgtaagaaaattttctggatagtttgagttctttggtgatgatttttatttacttatgctgccacttgtgacagcattacatcataccatatctgggtgcaattttgttgtttgcagtgtggctctgtctattcttctcctctcttcaattcttttaagatttcatactcttcccaattgagttgtttgcattttcactagcagatgtccaaactattaactatccaataaatttaaccatcttatcttcatatctatgggcttagataaattataatttaggttttctaatttatttgatctctttgcctaatatgacagccagatgatgttgcttgtgttggggaagtgggcttattccctctctctctgggagcatctgacagattgcttaatgctgatcatgagaaggtttactttaagggaatgcccatttataaggggaaggtagaacttcaattaatatgcttagaatggttttcacacttagatacaactatcttcaaatattaattctttcatgtgtgaaggataccatttctcctctgatctggaagtatgttgtgattacttatatgctagaggctttttttgatggccctgtttcataagcacttgtcttcatgcacaattaacaaattacaaactgaaaattaaaactaattagagtgaaaatataggaacatctttcattctgaactttgtctgttttatagttggttatcaaatgccgccaagacccatgcaagcttttgatgtccaaaatactgtaaatccgtatgatctcgattaaagatttttaaataatcccttctttgtaaactacataataatagaataaactaaatttgtaattttaactactcattctattactatggttataatttgtcatgtctaattgtctatcattgtaaatttattaacagattcttaggaggcatggagatataataaaaagaacagttgacggatatatcattgtgcaagggagggctgatgacaccatgaatcttggtggaataaaggtatcattattacatggaaacagctgaattagaagctaatcaggaatttcgaagattctgatagtaatcaaagctatcaaccagggaagcagtagaagaatatagctctgatgaccaaagaaaaaacggaagagtgtagaaaaaaaataaaaaagagaaaatttttcattccttgattcacgatatctgatcaactttccatttgtaaaggtgcaacataaattacaagaaaaaaagaaacaaaaaaagataaaccataaccaacactgctacacttgactatgtgctacaatcgttccagcttaacaatccattccagcttggcaacaattagaaacactgaaaacaactgtaataactttctgttaagaaaagaaaatttaactaatcactccagtcagtgtagaactagaagggggaattactatgggtgaagtaatgtgaaatgatggtcctaggatgggggatgaagcttttgaaggataggtctgcatgttagacttaatagtgtgagaatactatatctttcatgtccatggtctgcataaacttggtaagaatggaagatactcttaactgatgttcttcagaaattcttaaaatcatttaagaatgctttatcttccattcttacacatatggtgtaagaattctatcatagctttcatgtccatgatctacaagtacaacttagtaagtaatactctctaactgatcatagatatatcagatattctaaaactcacatgattgttgctcttattttgccattcctggactcgttttaacttttaaccttgaaatttctgtttctgatatgcagacaagttctgtagaaattgagcgtgtctgtgatggagcggatgaatgcattttggagacagctgccattggtgttgcgattgcaaatagaggcccagaacaactggttatatttgtagttttaaaggaaggatacaattcaagtgcagaaactctaaagatgaaattcactaaagctattcaaagcaaccttaaccctttgtttaaggtctgactcttagttggttttaaacaatattgaattggttgtggtttattaatttgtgaaaactgacatgacttgggatgatacgatacagttcactaatacattcacaaactcttttcattacataacaggtaagccttgttaaaattgtgccagactttcctcgaacatcttccaacaaaatactgaggagagtaatgagggatcaaatgaagcgtgagctatcagttcagagcagactttagtgaaaccattaattctcaaaagatcagcgcctagcagactcccaacattcagcatcttcatgtggaaaaataagtgaaggattatttggtttgagggatgaacatgatagatagtccttggaattggtatgcagattttcactgtaatatagcataggctatttattagctgaagtccttggtgtgtaatcaaaggcaaaagctaagaaaagaagtactaccggtggtgggtgaaaatataagagatgtaagaatataaatatttttaagtacatgtagcaaaaaatacgtatatctgggtgattttcaatgctctatacgcaattcacctttatacaataaaaataaagtctttcttttctttaaaatgaagacattttttttccatagatacatgattttatcattattcaatatttttagttaggttaaattattaattacttatacatttttttacatgaatttttttaatgcatgcttttaaaagatgatatattttttattgaggaattgaagaaagaggttaactcaaaactttagttccaaagatggacattgttagcaaaagtttttcccttgagttaaagtaaaaagattatgtgcatcgactttttagcaagaaacaagaggaaagagatttagaagtaaacatttgagatgtgatatcgcatgtttctaatttaagtaatttcagatcaatattacaaaattatgcaaaaattaatgacgccgtactaaagacaagctaggtaattaaaatagaaaaagacatcggaggttattggtgactaaaaaatatctaccaagttaaaaaaatgaagttttagtgtactattaaagattagtagagggtgcaaaaaaagtattacacaacagaaaaaatttgttttggttgtgtatagaccctcaactacacaataacagagatacaaactttgggggttgaaaaagcaatgaggggttgcgaatagtaaagtccacttggcagccttgacaaaaaaaacacaaatcatgaaagagattttcttcctgcaccattcaaaactcagagagtaccgtagttaccagaagtgacactgtgacagagtgacgaggagaagaaaggcaactacacacatacacacccctacttaactcgtttcagtggatagcgctcactatttcggaaccccaaaacaaagaaagtaaaggttcatttagttaaactttgggttatcccgtgtgttttgactcctgagcaccagctgtttgataaaataatccaaccattagtttccatttcttttaatttaatgttttcctaacttctctgtttctttgctcgataatgttctgacactcttctcctgtgtgacgctgctgaacagagagagagactcctcattcaagataaatagatgaatttccgttgacaacgttgtgaagttatgaaaatgttgtttcttcaaaccactgtcttacctagacccttctcacctttttgtgatgctagtttgcatccattgtcatcacttaacattcaaaatcctatgttggaatgtgctcacagcttttctcattattcccctgtatctagccaccgcattgtaaagtccatatcatgctctgtttctagaaagtctcattcaaaacccgatcctgaacctccggaacctgaagctagttcgaaccaaagagcaaggcctaaggcaagaagcagaagtggccaatctaaagatgtggtatccagcaatggtgataaaagttcagcagagacattccccactacgattcccaggaagccgaagcgtggtcgcagaagtgaagccgtggcagtggaagattttgtacgcgattcgctcgagcgcacgtttgctgcaattcgggaacaaaacaaggatgctttggagaatcatgagaacataatgaaggagagggatgatgacagttctaaatctgaaagtggtgataaggacgatgtcaatgatgatgaagaggaagatggcggtgaaggcttaagaaataagatggtgattgaggaagagagtaaaagctggcctttggatgcagatgttgggtggggaataagagcttccgagtattttgagcagcatccaatcaagaatgtggtgggagaagatgggtatgaaattgactgggaaggggagattgatgacaactgggtgcaagagatcaactgtttggagtgggagagttttgctttccatcccagccctttaattgtccttgtctttgaacgctataacaggtaatttctactgttttgggttttacttgaaatgctttttgggtatggatttgctggagctaaagagaatagaattattggtaatacttaagacaagagtgggatggaacaaatggtaaaactgaatgagatggtaaaaacttctcaacagcactcttaagagaagaaaataaaatggacatgggagaaaatgaatcaaacttcttaagttatgttcttcaacttttttagaagcttccttttttaacttctctgagtactgataaacctaatagcgctcagcacctatacttcccttatcatagacagcatttggaaacatggggtgggacaacttgctggttggttaactttggatactttttctccacatgcatttgaattggggcccaagaaaacagttttcacatttgatttgattttctttttccccgattgaaattatagaagtaaaactgaactttctttcagaagtgagaaattgtatgtatccatttttagtttataatttgattctcgtctctaatgaagtttcttcttctatacacaaaattcaattttttgaaaggttttctgctggcaatggtttgctatacctacttcttttaagatgtcatttcttcacagaagataattttggtttattcagaggcacgtgataatgcacatgagtgtggaaatgcataaaaaaattgtatttcgataagaaattctgtatttaattaaatgtttctttttgtttgtaaaaattgaatatagaaaatgccacatcggatatataatgaatgatacgttggtagcgatttcaaataatgttagctatttatagctaattttaacctctagtttggtgtttgattttgttttttccacagggcatctgataactggaaaaatttgaaagagttagagaaagcagtaaaggtatattggagagctaaagatcggttgcctccccgggtacgatcatttttctatttcatgtgataaaactgcactttcatctatttatacatgcctaaactgaaaagaatgatgttgctttccatcaatgcaaatcttccttctgattaaccacttgttagatttataaaattatattttctgttatttaattatcactatacaaatgttacaagtggtactattttagaataccgtgtaacatattgaatttcctatttataggcggttaagatagatatcaatatcgagagagatttggcttatgccctgaaagttagagaatgtcctcaaattttatttttaaggggtcacagggtcgtgtacagggagaaaggtgagatcattgatctttctcttccctttttttatgtataccagagttttgtttggttggtacaaagaaatgcacattctctttgtctaggctcttcttttataatgatgcactgttacttgtacctttgcagaactccgaactgcggatgagctggttcagatgattgcatttttctattacaatgcaaagaagcctgcgtggatagatgataaggccttgtatactcgttattaatcttcaagaatgtcatatagcccttggacaacctgaagattgcgtgtctttgtaatgaaacaaacaaaattgacagcaattgttttatgtataaaaaatataaagtactgaataaaagttaaaacaatcgagcactaccaaatttagaaattttaagtggaatagtgagtatacatattcattgttttatcttctacgcattagctatggagttcgaagtcccttgagtaaatggtctatacactaataatataaaattatgttataatttaatcataaaaaatatcatatatgataaatttattatttttacaacaattgttttaaacgtcacatgtagcatatttttcatcgattaataatgtagaagtttctgcacaagtatggaagttaaactcagaattttttggttttttaaaattgtagaattatattttgtgaatagccattcacaagaaacgttcgactctagctccactcattggtcataaatcataatcattagtattccttggtggggtggtcctcttggctttcaagcgatgcatataactgaatatggtgatgtttatggaactaaaaaataatattaataaaaacaaacaaggagtggcttatttgttttggattctattctaagcaggctttgaaggaaacatacaatttattctctttcttttacgccaattttcgttcaaaaagaatctttaacaaataaatttaaaacattggaaaacaatgtgatctttatttaatacttttgtttacatcttcttaatcattcataacaaattattaaaaatatacaacgtcttcattaaaaaaatataaattcaaacataaaaaagtgttgttatgctgccaccttcgccaacagagtgatgggtgtggtttacaagttgcaatgcccgtctagatccaaatttggtgttacatatatcgcgaagattgaatcttaaatgttttaccttgagactcatttggctttagaataagatacatttcattctctttaaaaccttgtatataattaaaatttgaaacatgtttatttattttttgtccttaattaaagaccgaacgaaaccaagcttttcacattaaaacacaaaggagtgcaaaaaggtgggaaggggacaaaagtttgatgtgataatcgccattcaacgacaaatcctaagggagaatttggtatttttgagcttccacgagttttatatccacagcagaaccaaccaattccacaagttggcacctctcatggaatcacatgtcctcgtgtggagcaccaacattagataatagatacagcaaatgtccttcatgcattccttattttactcttgtaatcaggaactgaaccagaaaaaaatgataggaggggaaaaatgacattataaattttatttattttataaaattaaggatgaatggagagtttttaaattttgattttctgatagaacatattaagagaacttattattttaggggggcaattgccccattttcttaaacctgggtcggtctctacttataatccgtatcctattgtcgttcacatgattattatgcatagcaaatgcatgcaaatttggaaagctccatgccaatatttaatcggtaattgctaataaaatactactatagtggagaagttttttttattagtaggaataaaaaataattattaaaaaatttacaataaatcaataatttacttattttatttaatcacttgagctagaatttcttaatataatgaatatgatcgatgagtagagtattatagttgttaatttgctatattatcgaccataagctttcttggatacatcatccggtctatagattaccgattttcatttgcaattaatttgatcatcaaaatcgattttaaaattttgacatactgaaaacaaaggcaagggggtgtatctctcgttttatcgcaactaaagcaaaagataaggaattgacatccccatggacatgtgctgcgatggtccttgcttactttttagtttttactagacctacgtaaagctcattcgttccaagatcccaaagaaaccaaccccacttcacacttgatggagaggccagactccagagcattcttccttttccgttttatcatacaatatatatatatatatatatatatatatatatatatatatatatatatatatatatatgcnnnnnnnnnnnnnnnnnnnnnnnnnnnnnnnnnnnnnnnnnnnnnnnnnnnnnnnnnnnnnnnnnnnnnnnnnnnnnnnnnnnnnnnnnnnnnnnnnnnnnnnnnnnnnnnnnnnnnnnnnnnnnnnnnnnnnnnnnnnnnnnnnnnnnnnnnnnnnnnnnnnnnnnnnnnnnnnnnnnnnnnnnnnnnnnnnnnnnnnnnnnnnnnnnnnnnnnnnnnnnnnnnnnnnnnnnnnnnnnnnnnnnnnnnnnnnnnnnnnnnnnnnnnnnnnnnnnnnnnnnnnnnnnnnnnnnnnnnnnnnnnnnnnnnnnnnnnnnnnnnnnnnnnnnnnnnnnnnnnnnnnnnnnnnnnnnnnnnnnnnnnnnnnnnnnnnnnnnnnnnnnnnnnnnnnnnnnnnnnnnnnnnnnaaaaataatctaaggtatgactattaagataatattataaaagttaataacctttaattaccatgcataacaattttaaaatataaaacatatgtaccatcctatcagacaggtcttcaatattgaagaatctactgccttaaaatgtttgaatatagatttttaagaggctatcgtcaattagacttattagaccgtcgcacccaaaattcgtttctatccctaaggatatgataactaatcttcagaaaaaaaggatgtgatatctaatactacatataatttcagtggctttggaagatatttgaaatnnnnnnnnnntatctcttgttaataacgtagtaagaaattatcaaacggatcggtgtagtaatttacaccaatatagcatagtgctgattcaaaaaattatcaaatatttttttttggcatcataaattaagaccactgaaaatgtcaaatataaaaaatgatatttaaaaataacttaaacttgcttctataattaagtatataaatatatcacaaaaggctattggcaacaactaaaaactaaaatgcattccatatttttttaacttctacttgtttcaattaggtggcatcatcaataaatatatttttaaaaaatatgaaatatatctacttttatttacagaaattaaatctaattattacttatctttcatatgaataataggtttataattaattatcatgagaaaatttagtattttgacgaacaaaatatcacaaaaaattattatcaccaataaaaataagaatttgtcattctcatttattcacaaattaatnnnnnnnnnnaacaaatcaaacatgaaaaacaaacatttaaaaaaactaaaatttgattttgtactaaacgctttctagatgtcaagtaaatcgtttatacatgggtagtgtaatttttctttttatatttttatcaatttacaaattactatataaaatttattgaccatcgtaacaataatagtttctaattaattgagaatataaaattttgtacactgataacgcacaaaaatagttcttataccaaatattaccttaaaataattacatcctgctagaaaataagcagtcacttttatgtggcaaggatcaggattatctccaataaaaaagagtaaataaataaaataaatgacgaacatggatctcattggccgaaaactagtttcgtaaattacaggaatgccaaggttaataacaaaaaaagaaatgccacattaattctatctcatttgttgtgggagggagagaacaagaacaacaacaacataggcgaggtttacaacatataaatgcgcttctaacttctaagtagtgtgtggtctctctctgtaggtctcgcccaatacctactctcagctcccaagagcacgcaccaccactagtgcacttccttctccttctccctctgtttttcttcttcgctaaacccttttttctatctcactaacaacacaacaatgggagacgagaagaaggccaagcctgctgcttccggcgtgtggtccaccatcaagcctttcgtcaatggcggagtctccggcatgctcgccacttgcgtcattcaacccatcgatatgatcaaggtgacgtcaagtttttacctttccgtcctttttgtatctattcctccaaatggacttctgggtctgttcgatttttgttgctggattcagatctgtgggtttttgtgtacgatctctgtttttgtgtgttgtggggtttgatggttttggtggtgtaggtgaggattcaacttgggcaaggatcagctgcgcaggtcacttccaccatgcttaagaatgagggtgttgctgccttctataaggtttttacatctcttcccatgctcttgttttttatgttgtttcattttctctaattatggatccttgctttattggtgggatgatttttggtgtattgatgattccaatttgttatgggttttggtatggccagatgttgtgtgttgtgtttgtttcacttgttttaattacctggctatagatctgcaagtggaagtggatttttgtagacgttgttgctttggattatgagttatgaaggggtttcttattgatgagtgactgttttattccagtttgagttttggacatgcgttttattatctaatggtgtctaaaatgtatcatttcttgtagggtctatctgctggattactcaggcaggctacatacaccactgcccgtcttggatcatttaagtgagttgttacgtctatgttcatcactcttgattaatcaaaagtagaaattttgtagtcttaatttctaaggctttctgctattcctttgctgttttgcattgtttataatatgatagctttgataactggaaagcttatcatctttcatggtttctaaggaattgttttgtgtgattgtgactaacttaatggttttaatgctttttagaatcttgacggccaaagctatcgaggctaatgatgggaagcccctgccactctatcagaaagctctatgtgggctgactgctggtgctatcggagcaactgttggtagtccagcagatttggcactcattcggatgcaggctgatgcaacattacctgctgctcagcgccgaaattacactaatgccttccatgcactctatcgaattactgctgatgaaggggttttggcactttggaaaggtgctgggcctactgttgtaagagccatggcattgaacatgggcatgcttgcatcttatgatcaaagtgttgagttcttcagggattctgttggtcttggtgaagctgctactgttctaggtaagtaaccattttactactgtcaaattattttatttgtatttgttggctttagctttatacattgtgatggtatttgtgagacaagtatgctcaactgtactacaccttactaaagattttgcccaaattatttttagtgcaccttatttaaaattttctgctgatgtttcagaagtctatgctttactcccatcgatccccttgtagacttaaaaacactgaaacaaaatgatttagtcaaaccttacaatagttgggttgtcttccacatccactattttatttgccaaaagctcaaaaattgccaacagatacaatagttggccttgtttttactgtttacaaaaacagatttatgttttctaaattttgtttgacccctgagcacatttctattttctagaagtttgtcctctgagcacttgaacagagtgcttgaagaaaaaagaagggaatgagaaaaatctcacagctgtttctgctttttgctttctaaaagacttgtttgggaaacaattttcataacttcatagattttagatgagaaattaattgctcagtgtggaattgttttataaaacagttttaaaaataaacctgtgagaagggaatcaaacaggtccatagtctttccttgttctgttttctatcatgtaggaactgaatttattgttgatgtctccttttttttacaactgattcttatcaattagtcacttctagtatgcggtagaagacaaatatcagtgcatttttgaaaagtttatgcaattcagggaaaataagagagaccaattgcaatatttctgtatgttattggcagagtagtttactcttttgaaactaaccatgttaatggtaggattttcgggttaatgcaccaatgttgatttgggcaaactcttcaagtggatgactaatttagccaagcattgaaaatggtctaagtttagcatctcattcttaataagtattatgcaatttggctctcgtacaatgtctaagcagtaagcagatatgtttctttctatttctatttttttgaacaaattgcgagacttgattgctctttgttgttttaagaaattatggaagcttgcataatattacacatgtcataattccttgtctgagttaaagttttgtaagggaaatctaatatttcatatggattgtgccataagctacataggttaatataatgccaaagattttattctcactgttaccaactaacatttgttcttctttaggtgcaagttccgtttctggatttttcgcagcagcttgcagtttgccatttgactatgtgaagacccagatccagaagatgcaacctgatgctgatggaaaatatccatacactggctctgttgattgtgctatcaaaaccttcaaagcaggaggaccgttcaaattttacaccggattccctgtctattgtgttaggattgctcctcatgtcatggtattattctataatgattcctttgcttttgtttatttgaattaatgttacattcaaggggtttgttaagtttatgttctgatatatgattgtattaattgcttatgcagatgacatggattttcctcaaccaggttcagaaattgcagaaatcctacgggttgtagttcccccatggtaatttggacattttgtgttgaattcaagctttgagtatattgaataatttgttgggtgtgttgtagccctttttggcagctaaacaccaatggagctgatcatttttaagtttaattaatcatgcgactgaagcgggaatttgcatacaaacattgtattagtgatataatataggattggatgcggctggagcagaatagtataattccatttgagcatggatgtcattgagaaacttgtggagatgtccaaaactagaataagtaatcctatctcagacagcattcagacatcaagttttgtaatttttttccataggtgggaagtatttttttttcaaccatatttcttattgagcattgatacacgtacacccatacgtgtatcatacccccacccaacacctgaaataataaacgggtggtagttgaaataataaaataatatatttaaaggggtggctaatggagggataaacactgtttgggtgtttgtgtaacttttttctttcttatttgttgcaagtttttcctttaattagtattttgttggtgtcttgttaaatctaatggttaaaggtaaaaataagtacaacgttttttttattaaaaatcaaatttgaaaatacactggaaattagtggaagacggaagtacaactacaattagcgttgaatttggttaaagatctcatcaaacaatgaattcattgagattttcttgataatttttccaatgttatttttggtcttttatctttattttaaaaggttaaaaagtattatgttataagtgcaatattttaatttaataattataagaaaaaatagaaagaaaattttaacaccacttatcatgtgtatgaaaagatctgtatgcgtgctatattttggttcacttgctccacaagaataatgtttgaatcacactcatcataattttttttttgttattatgttataagtgcgaaatgctcataacttattttgtcaacaattatttttttatctattatatttaaattcaagaggaaacaatttgaatacagttatactcaaaccaacgtacctanaattaataggaataaaagatgttttttataatatggaaaagacattttttttgtgtggtgggggtgggggaggatgagaataatcatatattcttgattgaaaaatatttatcctctaaatatagtaaaaatgataattctaatttatttaaatcccaataatagaaataatatgtttagtgaaaataataaacatagaagtacaataatttaattataatgaaaatatggttaataattatttttaagttttgaaaatgcaatacatgcgtactaaaaaattgtcatattaatatttctagtagaagagacttcgtcagctatatcaactagtgttttcacatatatttttaacacatgatcttctcagcagatttcttttcataatatgtgcaaggaagtcacaaacacggcagctccctttgatttgtttattaataattaatcattaacttctaaacttcaatttggagcttgtcacttagaaatatatatcatgctgtcgtagctagtttcatagtcagcttctataaaagtaacacctacgaagaaactcaataaaaattaaaaagaccacgcagtgccattttgaagttgcaaaatagttaaaaaattgtagtattttcaatcaaattcatacgtgataaggttccattaaaatgttaaaatggcgttcatgttaatatgttataatatatataaaaatatatatgtatgtatatgtgtgtgtctttttctttttggtgactggtgacatatatttcgccgtccatagcttttctctctatatagtatatacactactgcggtataaaaggtttgtttctatcaacggcgctcctcccaatttctgagcatttgctgttcagtttccaatttgtctacacattcaagttttgtttattagcaacaaattattaaaagagaaagaaaatccatcccctgggactacgcgtgaatataagtatatttatattcttaattatgttccattctcaatcttgctggttttcctgactatatataatacgcaaacaatataaaggttcatcaatcttgccaccaacaaataatcttgctgtctttcatccttatagctagaagctcattgcaatctttaggaaataatgacggttagaatttagaaacactattttgtcattttgccactgctcttgaattatgtctctctactgtcttcttgtgaacttccttgttattatcttttgcacatcatcatgcacacatgactacaatatatttcctttttattttcattatcaaggtgtaaataggttctatatcttccttgattataagcttaaggcgggaccgtatgttaacatttattttgaatcttttaattaaaagacatgcttaagaaattgtaataattatataaatttaaaaaaatcttaaagaaaaaggtatttaagtacttttataagaagttagaagtaacaacttctgaaaatgttaaaaaaaacccttaattacacaagcatactcttgattgatattcaactttattaatttgaaataagaggtttcaagttcgattgagctagctactgcgtattaaaatgttaaatacactaaatcatcaatagtattagagatgactaagctcaaacaaaatctgcattatgttacgtgcatgcattgtacatatattcaactacatgtggcctttgtattaataataattcatatggtttatttatgtttaactattcttcatttttcttttcttgtgttttgtagatagtagagatgtgtgtgcacatggactgtccaggttgcgagaccaagataaagaaagctctcaaaaaattgcgtggtacataaaagccttaactttgtgtgcgattgtttttattaaaatcatataattatattcgtgtttagtaataattgtgctaaaacggaatagaagatcatatacataagttctattttatatttgataaactttacaaataaaacaaaacaaacgtaaaattaaaaaacaatagatttccattctactgaaagagggtgaaaccaaaaaccaaaaatagcagattatatataagttctactttatccacgtacgtatcatatcaatcgctatatcagatttaatttatttcgcattgacaacataatgtcattgagcataattgacgattttttttctctctttttgcttctttaatatagaaagaaaagtataattagaccctatttgtgtgtgtgtattaaaattcaaattaattctgtattcaatcttgcacatagctagcgttggctcaacgatttattaattttgacattatggaagagtactaatattgtgtgattttatatgtgaagctttgaggaataaaaatatttatagttgaaaagaaactgatataaaatatattgcatatacctattattgaatgaattttctaaaatttagtgtataaatacacacatatatgtatatatataactggttttatataattcaagagttcaaatggacccaattcgttttttcctgtaaaaaaattataaaatagtgtgtatacaagtcttatgttagtgctcttcaaacatttatcgttgtagtgtggcaagttcaaattctacatccatcttacctattggtttaaacgaattgtatcatcaggagttgatgatgttgatatagacatgaggatgcaaaaggtaactgtgatgggttgggcagaccaaaagaaggtattgaaaacagtgaggaagactggtaggagggcagaactgtggccgtatccatacaacccagaataccatgccttggctcgccattacggcaatggtaattactttgcttctgccaagccctcctcttcttacaattattacaagcatggctatagttatggtgaagactttggctactaccacaagccaattggtgcagcaattattgatgagaaggccgtgtccatgttcagtgatgacaaccctcatgcttgctctataatgtgaagcacattgatttatcgcatgaacttcttgactttttcctgtcaataaacgtgggctacttagaaagttgtattatgcattggcaataccataataaatatcccttgcacatttatatgtatagatacttgaagtggaaattgagtggggaaaaataccaaaccacggtttattctagtagaaatgtgatttgaatttttgctagctagatagttatattcagtatttgatcatatctggtatagggttgattgatttaggtcccaagtcaaaatacatctccataagttaacacgtaccttaggatatcacgagctactcgatcacttggggattacagttctagacttgttttatcctagctaggtttcccaattagagctcaattgcatgaaaagccgatatatccttgcaacaaaattaacaatatagcttctatatcaagtagtaaggtattattcaaataattcttattatccaccaaaagataaatgtatttatcatgaagaagtgtcacattatctaaacctatcttatatataaatagaagtctagagttttgcactctaggtaggcctaatctctaaccatcttatctaagatttcatgttgacttgaatattggaattcttacaactataagttgtcccttttcttgtcaacttgaattgcatacataattaactagaaaatcattcacgatatgacttttctcgatcatttaggttcatatataatgattaaaaaagagtttaaaattaagtttagacttaattttatctttaagttattaaagacaaatttgacaataaattatattttttaataaataatattaaattataaattttatccgcctaagaattaatatgtgattgaccagtttatctacttgttttgcatattttcagagaatagtaaatatgaattttccatccttcaaggaatgcctcggacctttaggtgggagaggaatgttggaggggaagggagggaagggaaaaatttatgtagagacatcttcttgtttgagagttttaatttttgagggaaaggatttgaggattttcaaaactcctccaaagcctccaaagccttaaaattgttgtcccccctatttggagggttttttagaaggaaaagtaattaaaattattattataccagtcagtattaataaaattactattctaccctaatcagtgtaaaatatataatgtattaattttttaaataagaaaaaaattgtaaaaatttcttattaactttctattttcctctcttaatatatttttaactcccaaacaaggagaaagaaacttcccttattttcttccctttccttcccctcccttccccttcaatctcttttcttctcctcccctcctaactcccaaacaaagccttaaggaacaatttgattatttacaaaaataaataaataaataaaggcgccaaagcaaagcaaacccaaccccacgggtgagtggtgattttgcggtgacgccacgctgtatgtctgcttccgttgcgttgcgtgtcgtttacatgaatcagaaattaacagatggcttgttcccacccgcgaatccattgcccattccgagttctgagtgactcaaaagtgcagcgttgtgatttggtccagaagataacaacacttgtgccttcaattaaggattggttttccctatataaatttattatcatacatcacacatatggcaacggcacccttcattcaatcgcgctgtgcctactcgcctagaatttccaatcgcaacaacaagggagcctcacaacaagcccatatagcttcttcctcctcaccctccagttctactttctcttctggtaattttttttttatttccccttacttcttaatttcctaatcttctattttttttttaaactgatttgattgtggatttgttagtgctccaacttacgtttctcttaattaagatcgtttttgtttcattggccaattaaacatcgagcgttgattatttcaattttcgttctgtcattttactcttcgcctcctgttcttgtgtgcacacgagaggttggtttacacgtgggagagcagtgggggtccacctctgtgtagacacaaggaaaaataaaaaatactacttaggactagtgtaaaaactgaaaatccttcttaggctattgcttcctgtaccttcaagttgcttctttgcaccctttccggaatgtttttttacctttcggatgattggccattccggaagccaaaaaagtgatgcagtaaactacatcccccttcttaagctacttacatagtgggccagatttatactgttgggctagagggtgagttctgcttcctacaccagcgctttttccaatacacctacatattttttatttccaattttactctcatatggatcggcaatccgtaagagtcatatggattgtcaattcatatgaatcatacggatcggcgatccgtatgagtcatatggattgccaatccgtatgactcataaggatcggtgatccgtaagaaatctaatggtgtatgtcgatatgcaacttacggattttgagaagggcaaaatcggtattacactgtgcatgttaggtgacctggtactggcccaaggcgctgtatggtccaccttctttgattaatggaaaattgggaagtgacttcaagaccaatttatttattagctgattttgtattttgatactgggcagctagctagctcgttggtagttgtgcaccactttggaagttttcaacgttcatctagttctagaaacttcatttgtctatgctatgaatagggactctattttgattgatagaaggaatcacatgaaaggatacgcatactacttataccagagttaagaggttgtgactgaaactaaagaggagtgtatgaaaatcttagtaataagacaattaataccctgtgagttccaagcttattgatcacacctatctaaccttaaaaactagtaaaatagctgcaatcaaccctgtcaaacctttgaaccccactggcgtgaagctaggtaataaaaactaacatactattttcgttggtattgtatgcaggattgggatactatatggacttttcaccctagactcgataaatgcaacagaaggcatttaacttgaattcaagtataaatttgattttagtagtttattgagaatatcagttgatattacgggtctatatgtcttattttatatgtgcaattggcaattgcataccactaacttattgtccttaattaaggcaaaatacaggtttggttgcctaacattagccaataagaaatcacttgtgttcccagtggagagagtgtaaagtcaagcaccatgcataagcaaaacattcttccattggctacatgcaaccaagcattccctaggtagatagtgtgggtggttttctgccgtgggtcagttcaaatcgaatgcaaccagcagcaatctgaaagttgatagatattataccagtactcagcccaatgcaaccaatttgcccacttcttaggctaccataagcaaaatagtgtgagtaagtctctagtccctagttagtactttagtttgaccatctgttatagggtgatgtgctgagatcatttgaagagcagtaccctttaggcaaaataattcagataagaacttgtttataaaaggtggatccggatctcttactatggaggttgtcactccatggagatgagcaacctccttagcaaacaactaagccaccatttgagccaaaaaggggtgtttcaataagatgaagtgaccacacttggatggccagtccaaaacaattaggattgcatcataccccttagattgaggtagtcttgtgataaaatccatccccacattatcccattatagcctttggtataggtgaggttttgagtagacgtgctggagaatggagatgcggcttgatacttgttctgctagcagatagggtgttccactacaaatttagttactatagccatcgtcctttgccaaaatagttttgcttccaaatgcctatagctcctataagcccctgaatgacccctactgggtttgaatgaaattcaggtagcactgtagcagaactgatgtccattcttagttagctgttataacaattctccccttatagaataggcattcctgatctaaagaataccctggtttctcatttgttttttcctgaaatgaagtgataagtttactcaagtgaggatcaatattcattgcttgttgaattttttctgcatccagcaaaattggccctatgagagctatcaattccccttcctccatttgtgatagtgcatctgtggcccaattctcctgtccaggtctaggccaatagattatgtcaaaatcataacccagtggcttagccagccagttttgctgattttgggttgtttttcttagctgtaatgtgtttcaagagtttctggtaggttaaaactgtaactttcctgcctattagtatggactccaatgctggatggcttacaccaatgccatcaattctttttcataaatgggcttacttagattctacaaaatttaaatattgtatttgtttattgttcatttgatgatttgattgttgttgctctatctttagattgcaaaagttgcttttgttcctctggagttgacaagagacctgagaaggtagaactttccattatctgaaaggctacattgttttttctccttttgcatcagacgttgtgctcaagaatgttgcgttactagagtttgaccttgatgctttttgtctcttgttcgactataatgttctcaagacgacataatcttcagacttgctgttaaagggtgaaatgatcataggacaatgaagtcttccaacggttattgaacatagtctcaggatgatcttcatgatctttcaatcagatggattgccaatttttagtccctgtatgcttagagagaacatgttagcacataatattcttattcatcaatttgctttgtttgttatccattaaaactatagggccagatcatcttttcctcaacaagattcatacatatgccgcctcaaggctccataatgtcgggaaacctttttgcattgggcaacattttttacaattatttcctacttggcttgctttctccatcctctttctttgtcactcttttgtctattttctttttgtagttttctaggtaaaagaccattgttggaataaggttttgatagggaggagagaaaagagagaaagatggttgtgcatatttgtttactgaatgaatataagtttgatagatgtgataaagtactacaacctaatactcctataaacctactaatgattacggcaagtactagtactagtactagtctaagcctacaaacacaaagactaataatcccaatattctaacaacagtattaatattggtgcaaatatatgtttaagttttaattttcattaaggctggtagatgaatttttgcaggtacaaacagtggacagagacaccagggccttagagctcaagctatgagtactgtcactcttggaaattctattgctagcatagggaatttgaagaacgaccctgatcatctccttgttcttgttcatggtatcttggctaggtatgtgatatatttattgagagaataaaaaattgtttgaattattttgtgttaaaatatgagtgatgcttgttttgagctatatgggagtatgggtgaaaagtgaagtttacgtgcttaatgcttttaaagttagctactatattgaagttcagttggaaaggattatgattttcatcctgtttatgattagtgggtacctttccagtttgcctgtcaattataaatctgattcaattcatactctcacaatttagcctatgaatgtgaataaagtaaagtattcgtttcattgtttacacttttacaagttggtttcattgcaaaatttgggcacatggttgtttatcatatgtctcatctgtccgcttctttatgttggtctgtagtttagtctcatacaaagttgtactgatgttttgattgatacagcacaggggactggacttatgcagaagcagagttgaaaaggcgccttggaaaaacctttttaatttatggttagatatttttaactagtggttctctatgttatattgcataatgctcctctaggtctgtaaattgagcttgtttgtaaactgtacaagggtgtatccacccttaaattttagagggttaaagtggttcaaattagtttagtgtgttaagattgtgatgtagttgaaattaaatcaatggtggatgcacccttgtttgtgtattttacatacaagctcactttcgaagagctttttatctaatgtttgattgttgaatcatagtgttcttagtttctttaaattaaatcgttacttttgggatgttcaatgatctatgattctatggaggcaactgactgagataccttaaccagctcaaacataatctgctttacaggtttaagtaaacatgcaaaatttaactcactcttgtgctgaacagccttaactgttcttttcactttctttcaagttaatgctgaaaaaagtctatttgtatcatttggaaagaagtaagcttaagcttcctaagatatatatatatatatatatatataaaatgctgtgaagattttcttgggtattgcatgagtgcctcatccgtgaatgtaaaattatttgtctagctgaagtccttaacaattgtttgttgtttgcagtaagttcatcaaatacttacactaagacattttctgggattgatggagctggaaagcgattagctgatgacctccatttgaaatgtctatatatcagatttgtgttgtcattcttttttaaaacttggaattgtcttggtgctgtatgttgaaattatgagcttagggatagagcgaggaagagagataaaagagaatgaaacactgaattaataatttgatattaagtattaactaagatattacaatgtcttgatgtgtttgatatgtttgtaaaacttgaagctctaactcatatttatactaattaattaatcataatcctggctaattaggtgaacaaatcattgtgagataaagaaatatgttgttaactaaaattaagagataatgaggaaatagggaaactaaaccttgaagataatgcaagatatgacactccctcaagctaaagcttactaagtttgaggctttttttatccatctaatagtttctttgttttcccttctatttttctgagctgagatttgacttgactattctctttcttaaattagtttcttatacatagtcttagtttttacatcgaattatgcatgcttgtatttatattttgagatttttatttttatacaggcatacagccttagaagaaatttttaaatagaaagagtggaaggaggagagaatgccagtaactcttctaatagcagttccgatggaaagaatactagaataggatttgcattatcaccaaacaggtcctaacaaaattttaattttactggagaaatgttatattacaatcatgaaaaaggtgattagaaaataatgctaataaacaggactttttaagtcaaatgaatgaatgcaaaccatccttctgccaacctcctatgtttatatgtcttgttgatgctctttgtgtttctcaacttgaactgaaaatttgccggccataagagttttgactgtttagtgtgcatatatttcagcttccatttctgttgggtgtcccaatcctagaaaagcttgctgcacctatagctcctttttttgttggccagacaggtagtcagttgttccttactgatggcaaacctgacaaaccgcctctcctattgagaatggcttctgattctgatgatgggaagtttttgtaagtgaaggaatctatttgtactagtctttatccctctttttcaattaagtaatctaatacttacacagtttatatttctgtagatctgcacttggagcatttagatgtcgcatcatttatgctaatgtttcatatgatcgtatcctctcagtatgtttttctgttttacaacttgttaggcatatcaatgataaacttatggttcttttctcctcaattttggtaattttttaacttcatatagacatggttggttggcgcacatcctctataaggagggaaactgaactcagtaaggtgaatatgatgatttctccaattggattgtcttattttttgttggttactgatctccaatattcagcatatgtaagtttaatgattaataattaatacttagattatgactaaactaaaatcttgtaggatgcttggaattatgcttaacatcctaactgtgtttatgtcttccatttataatctgttttacttgtcttaactcttagatttatcacttaaatggtaagttgtaatttaaattctacaattgctaataggataactggatatcttctataggtatgaaatattatcaggagttctaatataaattttgttcatgtctcgatgaataatatcaagtaatgaaaataatagaagtataaaagagattgttattattatgattattatttactactttgtgtactagaactgttacagagcatcaaatttccttacccactcccaataataatatgatgtaccctctcccgataataatatgatgatgatgtattagattttatcatcannnnnnnnnnnnnnnnnnnnnnnnnnnnnnnnnnnnnnnnnnnnnnnnnnnnnnnnnnnnnnnnnnnnnnnnnnnnnnnnnnnnnnnnnnnnnnnnnnnnnnnnnnnnnnnnnnnnnnnnnnnnnnnnnnnnnnnnnnnnnnnnnnnnnnnnnnnnnnnnnnnnnnnnnnnnnnnnttttattatttactactttgtgtactagaactgttacagagcatcaaatttccttaccctctcccaagaataatatgatgtaccctctcccgataataatatgatgatgatgtattagattttatcatcatcattgtattaaatttcaacagaaaagggtttaaaagtgaacttgcatctactacatcaaagtttatgtgggacattgtgataaagaaacaaatacgtaaaatttgagagaattaagtctcccatcaaaatgtgactatatttcatttttttaattctttgaaaaatatttgtttactgctgtacttcacttaaagagatataaggttggttggttgggtggttaagaaacaagggaaggaaggaaaggtcgcggttcaatcccttctgctaacaaaaagctacaaactaacaattaatattttgtcgataaaaaaaattgtacttcacttgaagaacttcactagtttgactgttgattgggatcttcagttcttcacattttcagttatcagaatggttttataatttgcactgttaactcagttctttagtagcctaatctctattgtgccttcataattacttaattggaaattcctatgactgcagaatcacagcctttccgcaaaagatgaaagcctgtatcctgaaatggatgtggcagtggttcttagttgtatctgtatcagttgctctacgcagtactgatgttattgaatgtctatattaaatccctttgaaacgaataaagtaaaataaaattgatggatcaattcaattgatactgcaattaaaatgttgtgatttgtgagtggtgttaattctggcatcctagtttgttcgttagcttccgtgttgcaagcgtggaaaagaaactatagatgttgggtaaaggggaaagcgctgcaatccttttttttgggtgcaggttctgttttgaaaagtaggaggagattttgtttaatataagaaaagggaaacgcttgaattgtgaaagttaaagaatgtgaatatgtttatatggtattaacattttctattgtattggcagcctcctcgaaaatctttagatggatacaagcacgtggttgatgtggaatattgtcccccagttccttctgatgggcctaaatttcctccaaaagcagtaaaagcaaaggaggcagcacaaaatgcgccaaatacacagaatactgtagaatatcatgaaattgtagaaggtgattattattgcccagagtaacttattaaaattacgatgtgtatcaattatctgttcagtcactgatattcctctaaagccactaatctttttaacagatgagatgattcggggattacagcagttgggatggaaaaaagttgatgtcaactttcactcagcattctggcctttctttgctcataacaacattcatgtactgcatccatttaatctgtcggatgatgatggtatcactggtacagagtttttaacacgagtgcttgtctgatttcaggtgaaaaatgaatggcttcacaatgctggtgtaggagtaattgctcatgtggccgacagcttaagacagcaagaagcaccatcaattttgtctgctagcttgtaactagtgtactagtatgtaattccactttgcctgggcatgcctaatcctgtgtttgatttagataatgaaaatagaggagatgaagattaaagaattttttttgaagtaaagtgtaaaatgggtgggttccacatggaacccatcaaatttctctcctccctccctaaacctaacacagcctaactacacaatacaatatgagaaaacattcttttattacagtagtcattaatataattacaatattttattattaacatacttaaccttacggtagttcttacttaacagtgattatcatgcagcttttagaaagatacaccatcataccaatggaaacaatatggtttgtgtgtaacatgacttgcaaaacatatttgagcttctacatgttttgactgttatcagaatcatacatttcataatttgaagcttacaatttgataccatttggctacccactgatttatatggtaagataaattttaaatgactttgtatctgatacatgaataaatttatgcaattttgtatcatagataagaattatacgattcaattaaatacatgaatgaaaaaatacataggatttaaattcaaacgatgtaacattgatttgtacatattggtaaagaaaatgcaaaagttatttgaataaaattatttgagtttgatttacttatgaaaattaacatttttgtataaatattggatgtcagtttaatatgagaaccaaaatcctatagtttgaaaaatgagaaatagtacatatataacaactacaataaatcttataataaagagagataaagggaaaaaatgagaagataattttttttgaaatataataaatgatataataaaaagagatagacacataaaatgatgttatataaattattataagaattattttacatgtatcatatctcttataaaatgtagaaaccaaaattaaacaataaaaatattggtactcatatcaactatttgatgatgtcaacatttcaacttcatatcataataacattctaaaaactccataacacttctttaattaaacacaacataatatctttggaataatatcaaactcgaatcacccataaatcatcttatatatatatatatttttttttcttttaaaattaaaacaatataagttttttgaaccttatagagacctgatccaattcattattgattgagttaatatggtttggatttgacctaaaaatgtacaaaattcaaccaaactcatccccaaaatataatggagggattattttttccattttcacgtaaatttgagtgtagcaggctgtacaaattgaaataaatcttgaccattacattatttaaaattttccaacggtcaacaatgaacgtgaccataatgaaccaaattttgtccattccaccatacagtataaatttttaatgtttccgtgtgaacaacaaccccccttattcaaaagacaaaaaaagtgaatttgaaatttcaatgcccaccaaacgccaatcaatttgcctccctttcaatcccacaacgtgaccatcactcactccccactcttcaccaaaagacaaacgcgtggaaaacactctcctcagagcgcgtggcaataccccctctcctccacaacctaacccttctctcaactttcttatacccacaacacaacgcacacagtgacagtacacacaaaaattttctagagcgagaaagtgagaggagagagaaagtagcagatcctccatggcctccaccaaggaacgcgaaaacttcgtctacgtcgccaagctcgccgaacaagccgaacgctatgaaggtataataataataatccattctcttaatttccatgttgagatttcagagtcaccacactgtgctgacctagatgttcaattagataatcatgttccttaatttcggtttagacggttgaattttcgttgttgattttgaattcgaatttcgaggagcacaattgtgagaatttttgagtgtttggtatgctgtgttagaaatggtggaagcaatgaagaatgtggcgaagctaaacgtggaattgacggtggaggagcggaaccttctttcagttgggtacaagaacgtggtgggtgctcgtagggcttcgtggaggattctttcctcgattgaacagaaagaagaagctaaagggaacgatgtgagcgtgaagaggataaaggagtatatgcagaaggtggagtctgagttgtccaatatctgcagtgatatcatgactgttattgatgaataccttattccctctagctcttctggtgaacctactgtctttttctacaaaatgtgagtgctgagttgtcatttttttgttcttcagttggaatttagagtttttgtgtgttgatttaagcctttttttttggttgcaggaagggggactattaccggtacctcgcggagttcaagtccggtgatgagagaaaagaggctgctgatcattccatgaaagcgtatcaggtctgcttgtattttgacctcttgcatctgatgtggttttaatttaaacctggtgattctgattcatggtatctgttgtggagtgtggactatatggttgctttgcatgccaatctaactgaagccagagaagaaaaaatgcttctgttttcactttcctttgttatcagtcacaaatcttgcttattggtatttctttgtgctaaatgaatcctggacgaaagtgcaaagatattggcctgtgtccttttttaatttaccttttaaggtaattggcaagtcaacattctattattgtaattgtaatataaatcatttcattggaaggccttcaacatcaattttaatatatttttaatgttgatgttaacttgtagatgatttgttagccataactcttcactggtgatatgaattttgaaggagtgatttctttatcactaaagttgtgtacttgttaatgaggaaaagattaaccgaggaaaaggggggagtagggatgtagggtagtgcttattcttcaggcataacaacttattatacgttatatatgtcttatgaccacatatgatcagttttacatgtgtggcattgtgacattcatttagatgaaggcatcactgatatgaatttggctgtttagttaccaaagtatttttccgcttgttcatgtttatctgaacaattcataaatatttcagttggcttccactactgccgaggctgagttagcacccacacatcccatccgtttgggcctggctttgaatttctctgtcttttattatgaaattttgaactctcctgaaaggtatgacttttattttattttattaatttttaattgcccacctctttgtgtactatgtgccaaagttggcccctgcttaacaaatttaacacagtactcttcatatctcagggcctgtcaccttgctaagcaggcatttgatgaagcaatctctgagttggatactctgagcgaggagtcttacaaagacagcaccctaattatgcagcttctgagggacaatctcaccctgtggacttctgacatccctgaagatggaggtattcattaatggaaatcaatgaactctgtcaatgtgtttgctggactttgtctgcaatgtaaataaaaatacatgaaaacttttagggttaattacagtattacactcaaatcctctgaggtagtgaggtttaatagaatttcactcgatacccttccctttttagactctacacaaacctctgttaatttgtataaaatgttacaccatgtgcccttccattaatacagatctcccctgatttcttatgtagggaggtcaaagtaatgtgaaaaaagggaggggtaatgggtttaatctcattaaagctcagttgtcagtgtgatttgtctcatttgctattttttatttgtttccgtttgattggtctcataatgagttatattagtggtaaatgtgactcttcttactgggactagatggctgagttttcaagctaatcattgggggtttgcatatgaatttcattcaattaaatttaatttcggagatcgatggtcttcatgaacttgtgcacttagaattgagtttatacaatttttctattgtttaatctttatagttggataacaatttggtcagagttgtttccactctaatatcagtgtgggaactgggaagcattaacatgggtagggttattggacatgacatttgtatgacataggcattcagcattatctttaagattgggacatgggtgccgcaggatatgaaagaaaattgtatgtataaaaaacatttatatttatcattttcataagacataaaaatagcatataaaaacatttggagctaagcagaacttaaaaaattaagagcaataagaggtttagccttgattgatccaatgagtttaaaccagtaaataccaaataatttaaaatgaagggtctccaaccaaaactcaaaccatcaaaggttggttcttgggtggtgaagattgtggctgctgtgttcttgcttgcttgcccatattgggtcagaagcacacaaaacttgaaaatttggctgcctggtgtcagaaaaagtaaaagggtttccaaaatgcaaattgtaaaagcatgcatatcctcccaactggcacacattcaagtattggacattgttagacttacagtggcctgaatgccatacccactgctttagtatttttaggatcaggtgagtttgctgagtattaaaaggtgatgtaatattttgattgtgtcttactgtgtactatacttattttggtgttgttttcgattaggctattgcttctcattttattttagctatttttctttgttctgtggtcctgccaacccaacttcagtatctctgatttccctggttaattaaatatggcctcttttaatagcagaggaacaaaaggtggattctgcccgagctgctggaggtgacgatgcataggtaggttataatacccatttagctgatggtatttgggttttacttttttaccttaaagttacattttgcaatgaagtgaagcaggtattggccaaggaatttgtggagtgcatacgagaaggctagtttctctctggatagtttaccattaggatgttgtaatagaacatggagttggtctctagaaaatcaccatagggctttgtgagccttttatcgtgtgctttctgttaatggagactggagttgagatttgcatggtgtttggctgtaatttagtgaatttcttcatagtgaatttcttcattttgactttctttctaagaggatgctaccttgcattcttttatcagtttacatagataatttttatttaaaattatgcgaatcattgtttcaaaagagaagtgtgaatttacgactttattttcttaatggttgactggacttttactatttacccaatgatatgattgtgattaaataaactatcccaacttcaaattttatttattttttaaagggagcttaatatcacgttcaatctttatgggtacattcacgacaatactgcagacatactgtacgtaaacccgaaaaacaggaacgaaaacacaggcattgcgtaaactaaaaatgccaaattataagatatttagacacccaaatgctttttgacaccttgatagagaaaaatgtaaatatgataaatgatatgatttgatagaaagagaaaaataaaaagataaaaggtccttatgaatcatgaagtgcttaaaatataaagatgttcaaatatcaagcaccctaatatatatatgtgatgattagacaatagaagttatttacaatcatcacccccaatgcataatgaacacaatcctcatcctcttaataaaaataactccatccgaaccaagaatattaggatttaacaatgggcaattctaccttcgtcatagcctcagccctttgttttttgtccttctttggttcggcttctctattgggatttgagggcagagtttactgcgacacatggcacgcccagttcctcaccagggtcagcgagtacatgccaaggtacatgttgcatataagttcttgttaacaatttagcaaaatgaaaaccatacatatccatgcacacttcaattcaccaagaggaggttaagctggtgaagagaatcagcatcagcaacaacaatggcttggtgaaagagcgagcttagacttcttcaagtgaacaacaacaactaacattcaactcatcattggaatccattctaaccattcattaataaccattttgttaaatgtgcatgcataatgtacgtacttatttatatatgggggactttcctagcgtcgtgggcttttttgttgctagctggggtttggatgactggtccaatgtttaatatcgtattggacatgtcatgtgtgtattctcaaccttctagtgtctttcagaccattccaagttggaaagtaaaagaaaagattaccgatagaaccaattatttttagtcttctcattcttcagtcaatgatatttccggagataaccagtttttttttttttttttttttttttnnnnnnnnnnnnnnnnnnnntaaaatttgtaggagatcaaaacatatagtttcattatgttatggaaaagagaaatttttgttgtgaagaatgtctttggcaaaacaatttaactaaataaaatataattatgaaaataatgatattataaaaaaaaccttattaattaacattccattatatatcccttagtggtctttaaatcttatgttttgtattaattattaaagcaccgtactaagttcgacctttatagtatacccgttataattatatgaaactttcctgataaaaaaaaaattacgggtattcattgtgaatttctgagaatcacaattcctttaaatcatgttacatcctttcaaatgaaaatgaaattatcacacaaggatactattacaccaaatgtcgatattaaggctacaaaaatctgatgtaaacatggacgacagcgaaaacaggctgccgtacgtatttcaaaaagttcggcttaatgatttgattatcatcatgctttaatttctgtttcttaaaagcagaaaactctaaccatgttaagtcgatcgaagcatgctatgtctcccatcaaaggcgatggcacaataaaaggagggagggagagtgagctggtttttactattatattatgttgagtgaacttaaaataacaaggtttctttttctgattaaaataacactatttaacactgttttggagtcttaatttgagtacatctagttcccaattaagcttttcgggattaataaatttttgcttataaaaaaaattaacacaaaaaaattataataaatttgtccttacttttagtcattgttaaggactataaggatgaaaaaaaaattgaaagtaaaaaaaaaggttaagagacaaaaaaaataaaattttaaaaaaattaagatctaaaagatagtttaccctaaaaaagatacatggcatattacatttactggagccagtgtgcagcactcttatgttcatttgcaacaacgtcctcccctgttagcacctcttttattagctgataggatgggtgttgttcaccttagattctgatttcgtttttatttatagttactaacatagagtgtaatctatttcaaacggtttaacatgctagtaatattcagacaaaaggaatttaattaacgaaacaagtggaatataaattactgattatcgaggctactctcacaaaattgatgttaattacaacttatccgattaattacatatcattattataataaaacaataaatctgcccacttattattataaaacacgaaattggagtctttattttattttaacttcaaattattttcttatacttaataattgataccgtagattaaacgttttagccggcttctagaaccaagatgtgaacaaaagacggataaatcccctaattttcaaagcagagagaaaataaataattaataaaagtacaatttgctctcaagttttcgtatttacttttataaacttttccctttctttctcattgaccatttcttcagcgtttacgtttacatcaatcaattagtgtagcttttgcggatcacacgtcaaagcaaaggatttaatgtacttgaattaattctatatagattatgtgtgaactagagcatgtatatatatatatatatatatatatatatatatatatatatatgtaggtgagaaataatctgaaccgttcacgtctccaattgtaaaacatgattggttcatttgctgtcttttttcgagcattcacatcttcataatcagataaactttagattgtcactgccttttcaagcctcctttgtttctatctgattcggatgttctgtgatttcgtggatgataacaaattttctttgactttcatgctgagctgcagtaacaagcaattctataagatattttggcccattttatatgtataatatacagaggggatatgtaatgccaaaatattgactatacaaaaaagctagcttattttccaggaacgcaatcaaataattggatcattaattatcactttacttgggtcatgaagttgggaaatttcggagttccatgcacatagaagttttttttttttttaattttctctttttaaataaaaaattacacacacaatgtcctatccatgcttaataataagcaaaatatcaaacaaatgcttggtacacgggaacatatttttcttttgaaataccctatagatgtgtgaattagatgagattattaaaggattacttatttcactcaagttttttgagaatatatatgtgaaaaagaagagactagcaaatagaaggataaaacatagatgcatgtaatatcataaatataaataaatggtgtttttttttttctttcaataaattaaatatacaacacgtgtaacaatgattataagtgttatattttgatcaattatctgttataccttgtgttttattttttttattgagaaacaacaacaaaactatatttaaaatgataattgatacctaagtttttaagaagaattacttaaaaaacctcaaaagggagatatatgttaatacaagaaaaaaggggagagagaaaggaatgaaagaagtgaaggcttaacaaggttgacgttgacaacctgagctcatcctccgtcttttagatggaaaaagctgccggaaatcaccatgagccacggtggcaacatgccattcatccaaagtcagcctctcctccggttcaaactgttgttggacggtggatctgaatccactgtccataaatccaacagggtcatggcacagcggtttgacccttcgcctgccggctcctactggcacgttgcgaagggccccaccagccgtccagtatctctgacagcccttacagaaatgtctgggctgattaacgttgtagttattgaagtagcaaaacttggtttccatgctcttgcatcttgggcatggtatgatcttatcaggtctctttatctcctctgtcccatcttcactattttttttatcttcttttctttctcttccatacaacgtaatcgttgttccaaacagcttaatcccttcactagcttggccactttgtacccgagccattaattttagagagaggaggaaagagagaatattattctgagtgaagaaggtttaggttggggtggaggaggaaaaattgtgaaggtgctttttatatatacaaaggggaataaagctaaaagtgcacaatagttagtacaatcataaaccatgccatgggtctttggcagaaagtccatatgataaacgccaaacgtaggtagaatataaagtgcgttgccaaattacactaaataaaagagaaaaagaagaaaagctaaaaagggtttgggttggggtagtagaaattagaaaaagctatggatgagctttttgtacacatcaggagtctacgtcatgcccatgaagtgctaaaatgtatacatacaagttacaacacaacactggcccaatccaggtagatcgcttacaaagtgtaaaagagaatggagtataatatattgatttatgcaataaatcttataatatacacgagaaagatacgaaggaaaagtactagtactgttggctatttgataagtgatgtgaataaaagaaagagaattatatacaatgagagagaaagtaatttcttgtatttaaattctacttataatctatttaatttcaaatgtaagccagctcatagatattatatatactagccaaaagggatgatctctctatatattccttgttagtttctttaaagaaaaaattcagaaagagaaacaaacgaatattgtacatatattaattcattttctttgagacgactaaatgtcttgacatatgcaaacttgcaattcactcaaagtttggaaaataaggatgtttgctagctgataataacggataattaagtaatgaatggtctagagtctagagtctagagcatgattccttatttgtttagataagtcattgtttgggtgttgctatcctcccacagccaccaagaaatgtaaactattgcccgattggattcttttacactaacacatgttttaataaaaaagattaatactgaaattaatttaagtatatgtcttaattacatttaatgattcaaataattttattacaaatatttaatatttcaaaaataattttattaagattaatttgacctaactttaacaaatccttaatcgggtcagattgactacgtatatataacatttttaaaaaaagtttaacttatttagagaaaattgtaatttgactctttaatccatcctaacattaatatttcataaaattttaattatctaattaatccctcaaaagtttaaatcattaacatattatttcctttaagattttgttaataaataagtcatttaaagattgaaaatgtcatcatatttatccttacacaagactaaaggggaaaataataatctttcaatgatttactgatttcatttactaacggacaagatgtttatgtaatattttttacattaataatataaaaaaaattaaactctataatatatgttaacctctaaatatataatgtcaatatcatcaacagataaaaagcagttgaactagacgtcttaacatgtatattacaatttaaggttcgttatannnnnnnnnnttaatatttcaaaaataattttattaagattaatttgacctaactttaacaaatccttaatcgggtcagattgactacgtatatataacatttttaaaaaaagtttaacttatttagagaaaattgtaatttgactctttaatccatcctaacattaatatttcataaaattttaattatctaattaatccctcaaaagtttaaatcattaacatattatttcctttaagattttgttaataaataagtcatttaaagattgaaaatgtcatcatatttatccttacacaagactaaaggggaaaataataatctttcaatgatttactgatttcatttactaacggacaagatgtttatgtaatattttttacattaataatataaaaaaaattaaactctataatatatgttaacctctaaatatataatgtcaatatcatcaacagataaaaagcagttgaactagacgtcttaacatgtatattacaatttaaggttcgttatagaaaatatttgaagcttggagagttttaatttgttattataatgaataaagaagagtttcataacgaggaaggaaattaaattgaagaaactatctggctctgagaatgagattggatatatattctacacgaacgactcacgaatcaattttaaatatatttcgtgcttttttcttttccgtagacacattgtttcttaaagtggcatgctcctagtggcatttggtagcacttttcacgcaaaaaagccaacttttcatgttccaacagatttttggaaaactttaatgtatttttattttaaaaatactttttacaagcaaccgaacatcacaccaattcaaaaccttactatttaagtttgtgagtattcatcttatattttaattttttatttttatttaatgtaaattttcatattcacacttatatttcaacaacttttgttgattaaaaggaaattttaataaaaaatattatcattgcaaaaaaaaattgaacagaaaaaatcacgtaagataattttaataatattttataaagtggaaagtaagtaatcattttttttaaaaaataaataaattatcatgaaaagttatttttttaaaagaaaaagaaatagacgcaccgtttgtggccttgccaactccttttccatcatataaaatttagttgtgtcaggttcccttttagtacgcatcatttatatgatacttttatgtgccatttttttactaaaggatttttcatattgttaatttggaaagtgatcccatttccaactcattactctgttttataatgaagattaggaagcatcaatttgctttctttatcgatgaaggatacactttttcgtgaggattcttttaaagtcaatcagtacgtatctatttattatttcatcaattttaaaagcaaagttatgtccgagcaaaatatcatagtcatagatttctaattataataagggattaaggggaaaagttggatgttgcatgttgatctaatctagtcacaaaaatcgaactcattcattagtactttttcttttccattttcctttatgcaagaaattaaaaagttcagctatctataaaatattatattcactaatattatgtgcaagttttgccaaatatcatttatttattacaaatgatatcgataataaataagacaagtgccgtaaggctagcgagaaagaagatgcagcaaattgccttcctgaaatgaaatcaaagaggaaaacctaagcaagaatatatgaggtgcagtatggtaggtattttcttagtcaaaatttagatttcatgctgacctttcaaagcaactttcattgtctaagtatagtaaataaaactctaattttaattagagaatattattaaaattaacaactataatactgtaactaaatcttaacctatgtgaaatttaaatttaaactagggagcaatagaagaaaaattcaccaacttccccttggacacaatggtgctgctgcagaagccacaaatcgacgcgatggaacatgaggaacaacctgattgattctttgatgcaagttgaggatcttcaaccttcacataaatatacttctgaaattcagcttgtgcagcaaactcaacccttatctcagaattaagatttgatttaccaatggcactgaggacaggaatttgtgggggtaacctgttaaacaattgccatcatttagggtgcattttgtagagagagaaaaaataaagttgaagaaaataaatgaagaataaagtgaaaagttcatcttatttccagtcttccaaataaaaataaaactaaaaaatttattaattatgtgcagaatataaaatagttttacagtatcatttattattcgtttcaagtacattatatttttactatattaaacctgaaaaacaaatacattcttattttatcatttttaaaagtattgaacaaattatatatatatatatatatatatatatatatatatggtttcatcaaatttctctccatatctcttcttttttttttcctcttatattagctctccatatttgtttgataaaacattactacatcgtaaaccttacaaaggattctgttattttatttttgtaaccaagaggaattttgctttaagcataaaaaaaaagggggggttgtacgcaatctcaaaaattaaggagagtctcaatgtaatttacttaaaagtattttttattccgtggatatcttgaagatacattaatcatgaaatattattttatattactagtgcataagttcttcatactatcaaaaagataaatatggataatatttattaagtatggtattacatttaaaaaaaaagttcatatcatattgaatattctctttttattattttataaaaatatttcttattaaatatgaagaatattttgttttattggtacactctttagattagttgaagatcgtttttttttaccacatttaccacgtattagaggacgtttggtataaaaaaaatacttttatttcctaagtttggtatgtatctaaagaaaaatattttcaagaaattgataatttcctaagaattgtttttacctactttcccgcataaacattctcatataagggtcgagatccaactatggacctatcttgccgttgagagggagataataaattgaaatcaagtcaagtactcggaattatgatttttttttcaggaactttttacaaacaatggcctggatttgtgatctcacaatacatagggtcaacctgatttcctagcccatatattcaaaagcaaaaactaacgaagacattaattcatcatacgataatgaaagaaactgcactacacttaataacagataaacaagatttattcacacgtgtacatacaacaaagcctcaagcaacttcacttcaagaggctaaaaaacataaaggactgctcgtgtatgaaataatttttttttttaaaaaagaaaaacatgtcatgtatcactccagttatcatcatcttcaccatcatcactcgcaacaacctgaaaggttctccattatggatgctaattagatataaacacagttggggaaaagagtaatagataacaaaagaagagtgaccaatacctgacggattgcatttgccttctccaaaattgctgtaactttgacgtttgctgtggaaccagtggtatcatttgactttcctgttactgtgggcctcaggttgaatgcctgaaccaataaatatatggcaagtcaatgcaaaagttgactacaattaacatgatttatttgaatgttgctagtacatgttctggattgatttttgtcatcaatttgtaatttagaggactaattagatctaaaaaataactaagtatttaatgaccatttgacgtatttataatttataatgaaatacgaagttgatgacacttatatctgtggaggaccaaaatgtttagttaaccttaaatagttgagattataacatgactacatacttttgttctgatttgatataggaaatcttctctttcatctgtctcctttcccattctcaactggtttgcttccttctgacccttcaacttctgctgatccagctgcaggaaatgctcaatgagattaatacattgttaaattctaatatctaccatggctgcataaatacaaagttcaagagaaaggtaagaccaaatgttaccttgtccttcaatttatctataatgttgccataagattcatgatcattgtgattaatttgtatttgctcaacctgggtgagcctaggctgctggaggatagtagaatctggaagactgtgatcaccaatatgttcagcatctacagacatacaatactgtgtcccatttgtcatatccaactgtgattttgagactcgccattgcgttggaggaagaggaggaggaggaggtggtggttgtgcaggctctgcatgactatgtgacataacagcattattgcatttggaatgttttttactttctttctcaagtgcaggattaacattatcgtaacttggaaaatcaagtaaaggcctggacagagaatgttccacaccattcatagtacatgtaccatgtccaccttttacattggtatcatcattggacacagattcagttgatgaccttctgcaaggagaatcatgtaccccttggtcactgctttctggatcctcatcagattcccactgatcagagttatagtcagagtgagggcttcgaccatcatctgatatgtatggagatgatctacagaaagtgtcatcatcatcagagtgggaaactgaaccatccagaggaagggaagcttcagggaccagctggaaagaaggaaacatatcctttacgctttcatgatgattactgccatcaggaaatctcagttttaatttggaggtctctagtccactgacaggatggaaggatattttcatatgttcaagtggaggtgaaggaggaagtgactttataggatatccagaaccaactttctctttggaggttgttgtctcaggaagtgattgtcctacaatgccattttgtccactctggtccaatataacagatttcagagaattataatgttcagatttttcatcaaaagaaactttccgctgaaagctatttattagtaatctatgactaagtccaaacacacgcgatgagttttcaccatttccctggttgggttcagtactgtccttcgtgtcaggggtcgatgggagaatacttccaggtgcaattaccctgatttcccctaaactgtccctctcagtctgaccaaatccattactgtgctgagaattaccagtggccttttcagagacacaagcttggtcatcattatggcctgatgttgagaatctagaatttggttcctttagaatctgctcagcaacctcttctgatgatccctgttcctctttataaccattgctcttttgcattgaattatgatgtgaaccaccatctgtttcactttttgtgatcaaaggcccttgacctaaagaagttgacttgttaaagtcaggaggttttgatggctcgagtcctaataatccaccattagtccagaacctaactgaatgatcagccaaagactctctacgagtctcttcagatttgcagatactgttgttgatcttacctgcttcctcatctggtaaattagagtttttggaaccagaaaatgatatatcagtctcaattggtgctgacactgtatcattaacagtagaagaaccaatgtaggtatcagtgcatactgagttatccaaaacagaattttcacttgtgtgaggaacctgcacaccggcaggagtcttggagggatgagaatcagctatattcttggctatttctttgctaacagaaatatctgatggactcacagatgccaaattagatgcatgcggctctaatgttagagcaggagtttcttgcaatgagttgggcaaattcgcaaacatttctttgtttaaggaaatggtatctgtggtcatttcttcacaataaggagaatttgatggattcacaggtcccaaatttgatgtatgtggctctactgtgagaggaggaatttcttgcaagtcgggcaaattcccaaatgtttctttgttgaagcaaacagtatctctggtcatttcttcaccataaggaacatctgatggactcccaagtcccaaattagatgcatgtggctctgatgtgagaggagaaattttttccaatgagtcaggcaaattcccgaacatttctttattgaagcaaatggtgtctctggtcatttcttcactataaggaacatctgatggacttacaggtcccaaattagatgcacgaggctctgatgtgagaggaggaatatcctgcagagagtcaggcaaatccctgaattgttctttgtttaaagaagcagtgtctctggtcatattttctctatcaagatcatcagatggacttacatatcccaaattagatgcatttggctttgataaaagatcaagaacaggattttcttgcagtgagtcggctaaatgcccttgttcttcatttaagggaatagtataatcagtctgggaaatgacatcagataaattattgtccattaaattaggaggagcttcagtaactccattttcaatcattccacaagtgatacgtgaagataactgctgcacctctcgttttgttatataatcaatatcattttcagattctgattcaatggtgttgagagcatccacataattatcaggttcactatcaatatcatcagtttgaaccctattgcggactggtttcaggttgtttgcttcagtaaataggacatgattgtagtcgatgttggttatggtaacaacctcattcacatgcatatttgagtcatgcttttccacaagcctctccggagttttatttctatcacatgtttgactcttagattccactatctcttccttttcatcccaagtaacaccaaatgaactagaggcaacttgcttttccaacgaatcatgtgaaatactatcatctatatgatgagatactgatgacagagtatcatctgtatgatgagatactgatgacagagtatcagctttctgtttcaatcttgtagatgatggttctttataatctggctcatcagattgcatagaattacttggatggaaaacacattcaatgtagccagcaccagattttgaatcaaaagaatttgaataatgttccagatctgatttcattgtcatatctatggtggaagctgtttgtgaggaagaagtttgcccattgatagcagaagaaatagattgcattctgggtagtcaatataatatgtaagtgttgattttgaatgaacaacatacgccaagattaaatagacatatatagatgtaataccttccactagtgctatgcctctgttcaccccttaaaatgtctccattccttcgtgatcttttcttctgtccaacattttttgtgtaagcatcaagaaattgtttgcaaaaaaatcaatgcatgcatatgacaggaaagaaacagggttaaaaataatcttccccttgaaatgctaggatcattattgtaccttgcttttatgagatttccttgctttttcagtttttccagagtaagattcgtctgaatctgcagatactcttttaaagaaggtcggatctgaatatctcctgaaacaagatcctaggccaccagtatcaaatctgatggacacatggaatatttcattaaccagtacaggacacttgatttaagcaggactagttgactgtattcaactctttccaaaccagagagagatgccaaataggacaggtacaagatccagggctaccagtccaaatttgaactagactgtaactttttatcatctagaccttggaaattagtctaagaagtagtacctaactaatcttgctaatctcaaacagaaagacaaaacagggaaggaaatttaacatacttatcaagcaagtgtacacgtggaggatcacggcattcttcatatgaatccataataaagtgaggcaagtcattgtaaatgaaatgatttcgagcagctttcatgtgtggatgccattcacaacctgaaaggaaactgcttttcattaagaactcctataatctttgaacattgaaaccatgatcattaaataatgtagtattgcaaaatgaagtaaaatatacagatatatgctatctaaaaagtgcataaatctagcttaatgccacttgactgcaatcaggttgaatgtaatctgagataaacattactgtcaaaattatatatattatgagtttgctttttagtgtctttcacacatcagcttccatgtcaaacaaatcacaatgtacacacaagatttgatatataatcttcatcatatttacagtaaatcatgaccatatcagcccctatttcatcacaataccttgactcgttgaacatattgaagacatgaatactgaaccaaccacagtacttccagtttcctaaaagttttagaggtctaataacaacataatagcttgcatgctaacaaagatctatctatatattaactatggcacacccaaagacaaatgagatttctcagagcaatttccgtttaacaaatgcaaaagagagagcaaaagcagattaaagtggatatcatgaacaatgaaaagaaatagaaagaaaattcattgaaaacaacctaacttcaatatgatttagctgcctgatcagcacaatactagacaaacaaatgagagcccttcacattacttcattgatacaaattctagtgtgtcaattaatgtttagtgatgattggtatatcaagattctactcaaagaaacaagtttaagaagtttgtgatataatcatatatttaacatgggaataacttctctcaaaagctactgtatttgattcactcggggcataaatatgtttatgtcacaacttgtaaaacggtaatgatttgcattctgtgacattactcaggatgaattaatttaaaaataacacttttttttggtacaaatattatttgaagatatattttggcagggcacatgttcaaatcttagaaatagcctcctgaccccattaggccgccctttatataattttggagaaattctatgtggttttcaaaattcccttcaaataaaatttggtaaagataaaccctcattaagaaaaatacaataactccatctttctgaggcaataacattcagagatgaaattaacatattctgaaaaaaaaaaattaatatttccaataagtccacacatagaatgagataattgcctaaaagaaccataccagctgtgtaagctaaatgtatgtgacttgtttgtgccaatacagccttctccaaggcaggtagtgaagcttcaatgttttgaacctgaaccatcaatctatgactcctggaagctgttgtcattacttgctcttgcagaccatgaaaaacctctgctgcaaaactacaatttcaaaaaagtttcatcattcatgaatatcaacacaaataacaggaaaactagaactacttggattaaattgccttcaccacacaaatattaaacaaggtttcaacaatcatagagtaaatgtcacaattatcagtaactgtgtaattatatttagcctagataacagagcacacataccaaacacacaaacagatagcagaataggttgaaagtacacagtggacattggagagattaaatcgaatccaatacaagaaatcattatttattttaacattaaaattttcatgatttattttaagaaatatgcaaacataatatgggatatttccaaaacaacaaacacacaccataagtaaggctttacatctagcaaaactaacaataattactagctatttaagcgctaattctcacaaaagaacaacttgtccaaatggggttcagcaaggataaggttttgaagaaagaacacacaagatcccacatttgttctactctatcaaaatcaaaatatataatcaaattgcttggagttccaaccttgccaacaagctctataaatacaacaacaacaacaacaacaacaacaccaacaacaaagctctacaagtacaagaacttaaaattttaactcttccgcaaccatagcccaatttcattgtaacttaaatcaaaatataagtttttgaatagtaactcagatcaaaataaggagtaagacagacgggaggaaggtggcatatatcagtaatgacgatccgaaaactagaaaaaatccacaatggcattcaggttagtcgtattccttctacttcggactatatttacagctgtttagctggagcatgacatggaagtattagttaagttaaaagagaaaacctctagaagaaaaatcaggagtcagcacacaaagttagaacaagaaagcatttttagacaaatccattcctcgaaactattgcacctcgtgaaccacccaaactcttagagagaaaatgatttagagtgattatccaaatagcaaccaaggtcgagctgtacacaacttatacgagtctacacaaagctcaaccaaaaacaaaagtcaaagagcattttgtctccttatcaattgaaacttggcccaaaatccgaaaaataaaaaacagacctcaattccaacggctaagtaccattctctctaaacaacaaactcagccatatttggttacaactaaaaccaacattctcagcaacccccaaccttcaaccccattagagcctcgaaactacagaaattaaccaagcccatttccaaaagaactcccataagtataaaaattgcaaattgcacctatttaaacaaacccaaatggaaaaaagaagaagaagaagaagaagaagaagaagaagaagaagaagatgatgatgatgatgatgtcaaagaaaacatactcggcaagatcaccaagttgcctcaagatcccaacaagaccagccacagccacaccatccaacacagctttagggtcctctttgtttgtctccctgtacaactcaggctgccccaaaccgaactcattcctcacctgcaacctcaccagaggcattttcctctcactcaaacagtgaaaacccaaaacaaagttctcttctctgttttttttcctcttttatttacccccttctagctgttaactcttctgctgaaaccaatgaatgtgcgtgtaggacgagaagcattaaatgaacgaattaagaaagagatatcaacaacaacaacaaaaaaatggattttttgtttttttgcgggggggagattttagttttagagagagaaattaggtgggtgtgtggattgaagcagcttaactgccaaagagaagcgacgaagagtgagaaagcaggttaagtgtacggatcggtgaggtaagggagaagaaggacattgccaaccctgcaagccattcttgaaccgaaacgatagtctgagaaaacattggctggaaatttaaaataccaaaaataccctctgtcttttctttaatgccttacgtgtccggaaaaatgttgtgtgataaaatgactggtttgggtctgtgaggtgtgaccaaaccgtggctttctttctatggctccgaaccttcgacgtgggtaccacaaactttttgaggtttggtcaaaatggtaaaacgcaaagggaccctaactctagacatgaatcggaacatgttcaattttgtttctgaaatcctattggggtcaacttatgaaaggaaaaaaataaaatgaaacaaaaattgagaatggcgaagtagtagaattatccgtatgtgaagtggataatgcgagatggtgatgtttatgatcgcaaaaatacggtgcttcgggtgacaattacggatggaatggcttctgatgtttcaatttcagggatttaatgctaagatctacaatgtgttttatgtggtgggatatgtatagcaccatagtcttaattagttcaaggatttaatgctaagatccaaatttgtttttatgtaatgggatgtgtatagctagaatctagaatattaattaattaaaagatattgaaaatgttgtatggaattcttatattgagaaattgatggatttttcaagggtagtagtagtacgtacctagatagccattcataaatgaattataagaaagcagttgaagtcatttacttgagctgctcagtaatggcgactgcatgttacactctgtaatcttttcttgcatggtaattaattagatactaataaggagagagagagggagtaatggcatggcaagggctacataaatctaagtacaaagatggtatttttgtcaaagaaaataagaaaataaagtaaaggaaacgggaaaaggaaagtgatagaaagagatttgtcattaataagagtaaggcgcaaacaaattcatatgtcctttgccatacatcataaatgtagataagggaagttttttcctttcttttttggagttcttaagctatattagccaatggatgaattgtaatccacgtcttttaaaaatttatcgatccagtaattaaatgtaattgtaaatgtattacttgatatagcaaaaaaaaaaaaaaaaaaaannnnnnnnnnnnnnnnnnnnnattaaaagatattgaaaatgttgtatggaattcttatattgagaaattgatggatttttcaagggtagtagtagtacgtacctagatagccattcataaatgaattataagaaagcagttgaagtcatttacttgagctgctcagtaatggcgactgcatgttacactctgtaatcttttcttgcatggtaattaattagatactaataaggagagagagagggagtaatggcatggcaagggctacataaatctaagtacaaagatggtatttttgtcaaagaaaataagaaaataaagtaaaggaaacgggaaaaggaaagtgatagaaagagatttgtcattaataagagtaaggcgcaaacaaattcatatgtcctttgccatacatcataaatgtagataagggaagttttttcctttcttttttggagttcttaagctatattagccaatggatgaattgtaatccacgtcttttaaaaatttatcgatccagtaattaaatgtaattgtaaatgtattacttgatatagcaaaaaaaaaaaaaaaaaaaannnnnnnnnnnnnnnnnnnnnnnnnnnnnnnnnnnnnnnnnnnnnnnnnnnnnnnnnnnnnnnnnnnnnttgtgaggctttaattcgacattatagtcaaacatatgcattctaaaaaatgcacgattcatggagcagttaacagcagtgctaacaaaaacaacaacttagggcattttcaccaaattcttgaggaataaaatatgatcaacagtctctttcgttgagtccgtaagagttgacaaataaatctaaacgtttggtgaaagatttgacttggaacagtcatctagaatctttattggctttcacttcacccaaaacaaatgtcatttgattcgtttgattctaattataatagtactaccaaattgatcattatactactattattcccgagtcattatagtaacacagtaacactctgaaatctttgagagacctacatattcttaatttgtgttttcgaatccttgtttccaccaatacacacaatcacgcataatccctaatcggtaagtagaaagtagaaactcaccatttatttaaatacattttttttttatattgcgtgctatacatgttgtaccaacattaaatatatttttattgaattaagtcatttaaataatatcatatagcttttaaagtttaaatataataaatatttacatcaaacaattattttttaacttttttttcatcattgatacataataaaaaaaaacacctttaataaattaaacaataactattctggtagccaatatttatttttacnnnnnnnnnnnnnnnnnnnnnnnnnnnnnnnnnnnnnnnnnnnnnnnnnnnnnnnnnnnnnnnnnnnnnnnnnnnnnnnnnnnnnnnnnnnnnnnnnnnnnnnnnnnnnnnnnnnnnnnnnnnnnnnnnnnnnnnnnnnnnnnnnnnnnnnnnnnnnnnnnnnnnnnnnnnnnnnnnnnnnnnnnnnnnnnnnnnnnnnnnnnnnnnnnnnnnnnnnnnnnnnnnnnnnnnnnnnnnnnnnnnnnnnnnnnnnnnnnnnnnnnnnnnnnnnnnnnnnnnnnnnnnnnnnnnnnnnnnnnnnnnnnnnnnnnnnnnnnnnnnnnnnnnnnnnnnnnnnnnnnnnnnnnnnnnnnnnnnnnnnnnnnnnnnnnnnnnnnnnnnnnnnnnnnnnnnnnnnnnnnnnnnnnnnnnnnnnnnnnnnnnnnnnnnnnnnnnnnnnnnnnnnnnnnnnnnnnnnnnnnnnnnnnnnnnnnnnnnnnnnnnnnnnnnnnnnnnnnnnnnnnnaatatttacatcaaacaattattttttaacttttttttcatcattgatacataataaaaaaaacacctttaataaattaaacaataactattctggtagccaatatttatttttacatataattgaattctatttttaatgttttttaaactctcacttcttttaaaaatatttctatttatttgcgttattttaaaattttaatataatcttattcaattttaccctcattttagaggtaaaaataacattaattacttttaaaaaattaaaaacagatataattatagaaaaatatataaaaaataaaaatatattagaaaatttgaaaagacttttaacttatgattatattctcaatccaagtataaaatctttaaatgatataataataataataataataataataataataataataatagcatacttatatttatcatgagctattaaattcatatgaatggatgaaaacataaaataaaaaattcacattgatgatttatttgaatcaatttcatcatttaaatacaaaaatgaaaaaaaaatacatgaatacgacaagaaaaagaagaataaatcatattttcattcagtatcgaatatttatttcgaacatgagcatttgaaacaaatttaaaatggtgatactcatgttgtggtgaactatggcttgtattttgtgtataaataactatgatttgtatatgagccaactattataaagtagtactataattccaacaaagtgccacaacggctctctgcttgccaaatccaatgctgccattaattagctgcgtagtggaaaattcacgctgttgcgtcacagtaatcaatgaagacaggcagtgcccataattagtccttcaatttgtataggtttcacaatattcaaaaggatagaattgaacttatattttaattactttgttaatttatcgtatataaattaaatgattcaagttattggattgtgaaagcaaatatagtataataatgcgtggcaggctagataagtaaagcaaggtgttaacatgtatttaggcatctttggccataattaactgctcattgcaattaattatatattcatccaaaatgaactactcctttctctatgtatgaatgaattaaatagttggatgacttcaattttccattccttttcttcctggtctttcttctttatcttttctttgcggccttttattttatgtgtcattaatttgttgtttactttcgttaaaatatggtacatagaaagtaagatgattgtgctgtcccatttctttacagggtatacgtatcccaaacaagaatgatatttattaattcatacggccagttcaatgggttagttacttggttcctttttcatatgccaatattaaaataagtcaaggtgtaaatacttacttgtgcttaactcttcagtgaaaaaaaaggtatgcttaactctcacttaacacgggtagaaaaaattaaaagaaaaacggtaaatctatcaaatctactcaatttatactttcatgagtagtatattatattgatgtaaacatgttttttaatctcaattatcactagtaaaaaaatttcaagaacacctaaagttataagtataatatctcttcaaccacgctcacaaactttggaaatccctttgcaatagaattttataaatgttgaaaataacttgtttgtattatccgtacgtaggtatcattgtatcaagaaatcatataacgtatcattagtaaaagaaggtgagacatttcatttcttgattttgtttgttagtttgtgtcttcaaataggatttgaagtcaagtctcttaaaagttccaatttttttttttaataaatgaaagattaaataaaaggggcagacagagataacagtttcacatgatatccacgtgagctacgtacacatcccgcaaatatagacaagggcaatcaggtgatgggatcatggtacctgtgctcaccatttctctatatttatattactaaagctacacagatcattcatgcaatgaaataaatcaatatgtatggaggtttcgaaagatatataaatttctaattatgtcttgataaaattaatcagctactaagagttacatcacaaaccatttatttaaagagtttggttagcttccaagatatggtagattcaaattaacacaaaggaaagaggattttctgctaattaacttattcctccaaattcttttcattcgtttccatcaaaccctccatcatcgattgcccagtacgttaccaacgggagacactggaattcattctttcaagagcacagtaaatcgagttatttcaaaatttcttaggtgtttcacaattaaaatttctttaagttgatttttttttttatgtaagttttctttaagttgatgtacatataagaatagacgaaattagcggatgaagcaaataacaagttctataattaattaattaatgttacaagttatatccaatattatcgggaagaaaagcgatgcaagataaatctcttacgacttaggcttattcttcaatttttggttgagatattaattagttaacatgataaactaattatatacaataaatagaatactcatcaaacttttagataccatgtcctttcatatttcaacatgagacggtcacaccaccatcacaaactaaatacatgcgcagttatagctcagtttatggttctggttcatgtgcaggatgtcacatttaatgcatgaatctatattcttctcattgtgattctttccatcgttttctgttactatctcctctaaaattatggcaaataagagttattctaattttctcaccaatccatcaaaccctcttttcttccatgcaagtgaaagtccatctcaagtgcttgttttttctccattaaatggtagaaactatcattcatgggatagaacaataaaactggctcttttggccacaagaacaaattgaagaatgtctatggactatggtagtattcctgttccatactttcattgatgtcaaattcgatccatgcagtttggactatggtagtaagatgtgatggttcttgcatggattcattgtttgatttaggacttgatgttgcaatccatctatggatagatcgaatttgcaaaggggacattctcaaaatctttgatctgctagagaacatctatcctatatgcatcaagatacactaaatgtcactgagtatttcagtgaattagaattcttatatatatgggatgaattggataatttcaagcctgttcctagttaaatgtttgattccttgtagctgtgcttctatacagttgttttaggcaaagtgtttggttttggagacgaaagtcattataattttatggggtgttcggttttttagatttacatgtgggggaagggtataattgtgtggtagcatgctttcaatgctcatgttataaataaaatgttagtaattattaatttgttaatttttgttaactgaatatttgaaattcacaatttctttttcctcatcttttattgttaagtcaatcttatattttcagttcatatattacttatataccctgtgtttttttctaagttttattatcattaaatttcacttgactttaaaaaaacagttacattgtttcagacatgttaaacgtgtgatgcatatttttcctttgaaaagaaacatctaaattaagataaaaaaaaaaaaagactgcttgaaatacgattcaaaccaaacaacagacgtgactgccacagaagacgctgaaatacaagtcgagagataatatgtttggaataaatttatggaggaaaaaattacttgatttttgatagtgaaaataaaataataaatagttacttttattttttattgatattactattactatgattttgtaggatagaatgaattacatgttatccaaatacactagtactagtagctagtgatggccgtggtcaagagtctgaaaactggtgccagggtgaaggatctgggtttgtttgatgcgcttgcaaatatgtctgtattttgcaaaggtttggataagttttctgtcacattttggtaggcccgttataccgagtggtccaacccacacaattagcaattggcagagtattatctgacatgaatggtccaagaggccatgtagcattaattcccaaaagctctcatacattttcatcgcttgggatcatcagatcattctaaacacaataggcaataggcaataggcaataggcaataggcaataggctcaaaactcaaaaagaaagtgttttttttttttttttattagaacgtacaattaaggtaccgaattttaggattcatccaattatggaagggatatatgtaccatagcacctaaccattccatgcttcgaataaaataaaaatatatagcgaactaataaagttgttttcgtgttattaccatgttgattaatggatagtcttagatcgaaaggtaaaattcaaaactttttaagcaatttgtccctgcaaagtagctcaagtggtagttatcaggacacgggttggaatctccctataacacaaatcattgcgtttgatcttccatcaggaaaatgttttgctccttaagtgcagttgattgggtaacatagccaccaacaccccaaaacatcataccatataacataaatataattaataagcacactcgcttgcttatcttgcctcaacctctatcacacatagtttactggttcttgtgaattcactttcataatcgaataaaaggcccacactgtcaccaatatgctttggaattttgtctggacctgattctcttgagaagttggcaaacactatgtccaatagcttttggtcacttcttaggctaaataggtctagccacactaccaaccccatacgatccaattatggtcattccggaagccagaagtacataaagaaaaaaaaaaaaaaaaaactccaattatgttagcttatggattggtcagtacctacataattgtgccgaaatttgagatccttaagtcgacccacataggctgaagtagtagccgggtatggttgtcttcttagagctttaccatatggaactgtatcaaatttcccattatctttcttttcaaccattgctttgcctgagccatcttggctttattgcttagccacaatggattcaaacatgatctgacaagcagtgggaacacccaaaatttggtgtttagcttgttagcataattgaatcagtcttaaaaatttgttcctcaccccgttggggaatattattgataattgatatgattagcctgttatttggcttatagtttatgggcttatagtatggattgttaccattagactagcccaaatgcccaataatgagctataattagattatgcggaaattattacctcttaactcatttttttaaatagttttatcaattttaggataaattttaaaattaagcgaatgtttcgttaaattcaggctaaaccagctattgtacacattgtagctcgaacaaccagttatcattttgggctttgctgagaattcctctcactctttcagcatttccctggtgtctttgaagagaattttgtgagtgagattttagctagtttcatgtataaacaaaaagacaaaaatatataaagaacatttagcctcaactaagtaaatttctgcttaagatattcttatttgctcctgtaatcttattgttgtttcttttagatacgtacatatatacttagggtgccttagttctctgataagatggttctagagagacaaataaaaaaagaagaaagtcaagtgtcttaaaaattctatagagtggtcatagaatattaagatataatttataatgttatttagtttttattttaatttcctaaagtcaggtgtaggattataattatttaattgttggcatttgttaggttagatacataatttcctaaagtcaagtcaaatattaattttttgtcataaaatttgatgttaattgctaatgtactcatactaaaaaacaatgagtgcattagtaatccatatatatatatatatatatatattaggttatttacaatatagtagatagttattaattagttctctaacactcatagatgggttgcatttgtcatggtgtgatcacaattcacaagaacacatcttctcaatttttacattgactgatctgacaagaatatccttttacttgacgccttattcattattatgagggcgttcttccttagttgtcttccaaattctttctcaaatcaacctagaaaacaccaatcattataattttggatcctaataattaacggagacttaagatagtttatccacccctaaagtaatatcgatacatacaaaaatagtttagttctctaataggatttcaatatatccttacagaattttatctttttggttaaatatgaggctaatttttttaaagattttagttctttatcttttttctcaagaatgtattttgtaaaaatgaaacctgtgtcaatttcttacaagttgaacctatgttttttattttttaatttttttttgaatgaatataattgattttcttactctacttaaagaatgtacttttcaaatcaataatcaataaaaaaaataaaaaccttaatgagtgatctcaaattcaaaatctagatattcagttagttaaatactcgatggaatttcattaatgataccaagttgcaaccttaatgatatcctgaacactaagcaaatcaaaataaccaaatcaataaataaaatttcattatgaaccactcgcaaatgataccactaaacgagctgtactcaagcagaaaaagatggttacataatgcatatcatttagttccatgactactaatgacaatatttcttctaaataatcccctttttattggcaatatatctaagagaagttggcatgagcaggtaagaaccttttgagggacaaggcatttccagaaactttagaaaatatcaaaatcggtaattagagattactaattccgaaggaatctgtacacagatccaacttaattagaaaacatttgagctgcctaacttccagacccatgcatctgccctttccttaaatagggagattgaatttaatggggacataattacataaacacctttaataattagtgtatgtttttcctagaccaaaaaactcctccacctcaatttacaagcccaaaagtcatttcattttttcaccactctcccgtatctacaagatacacatttttatcttttgaaatttgaaataatctagacaaggaatgtttcagagtaatattagccaattatcatgccaggacaatttccaaccttctctacaccctgttttggaaccaattcagagtaatattagcacaaactcaatattccctccgtatctcgatcagtttttgactgagattaattattaataaaattaatgaatatgataattcaaaacttttgaagagggaagttaataacaactgtacacggtatggttcatttaaaactgcggaggattcacatctatttatataacttttggggaaggggagtgtaataacacgagactgatagaacttgacttgtatcaagggttaaaagaaggatttactctacaaattactatattaacttgattagtatagaagacacatgaaaatgcaaaatccattacatctttgggggttcaattatttgtcagagttcatattagagtactaagcgcatttcaatagattcaagaattcatatataataccccaagaaaattcttcctttatataatactctaccataacaacacaaacttaacctttttgagaaacaagattttttttttatcaaatgttaatttattaattttattaaaaaatgtaaaggattcaaactactacctctcgtttctctctttttccttcaccatttctccggactaagctatatctcttttttaagtaagaagataaattgtagatacttcgaaagtctgcataaaaaaaatcatctgtcatcactccctgttccctatcctatccctccaattagatcttttgacatataaattaaattttctaggcaggttatcacctgaattggacgtcgtcctacctttaaatcacgtcaatccccatgtaaaacctggaacgttcgtgtcttccaatttgtttttcatactatcaaattgctctcttcctctatgttgattatgttttgttccaacaccgacacctcaagccaattccataagcctcatcattactaacaagaacttgggacaactctaatttcggatttgattgattttgattattttggttcgttttataataattaaaaattgtttaatttggttttaaacacctttaataaaaaaatattttaatcattacacaatgaaaatgttttaaattcaatcataaatcatcaaagttatataaatttcatattaaatattatgagatacacattaattcatcaacaacgctatgtacagtccacagataactaagtttttgaacatattattaagaatttgattcctaaccatgtaaagtgttgggactcctgaagactattacttggatggctgatctaggattaactcctcatttttaatctgattacaaattaattgtagataaaattaacaattttgaccaaaatgcttgtgcgttaggatacattattcttcaatgtaaaaatttgcacaaaacccaaactataggattcagtttgataggaggcaagcgaacattaaagcccacttgtaaaagtacgtggccacaattcatgttagactcaaagtttatcaacatattttatcttccaatttattatgaatgaaatttcatgatataagttttgtaaaaaaaaattaaaaatattttaattgagaaagataaaattcatttaactgatttctacccctcgaaagaaattaatatctgattatccattaaaagtattcttttttataggggtgattaaaaaatatattattggtgtacacaatatatattattgaatgagacagagaccttttaggttcaatcttaataattatcgatgcaaaagtgaggcgccgcttgcatctatgattgcatttttctgtattttttcgattccttacattctgcaccacaaagagcacaaaagagaggaggaaaaaaatattttttcagcttttcattttgattatttaattataagaatccacccaatcttagtggtcgccctctttgaaaaagttgccaaatccttaagagctcttcttttgttatcccgtatcctgcattcttcccagctattggagaaaagagggaataagaaagacacatagtgaagtgatgtgaaatttatttgaaaaatggatgttttcatattcaaattttacgtgataggtttatgtttattttctttctataggacatttaatgagtaggacttgatataaaaattaatgtagagaaaaatagatataaaatttgtacttgacttactacgtaatgaaattaggaatgtagttagttatcttgatcttaatgggatcatggctgctaaattttcatattttcttcgttttcgtaaatgtatcttttttttgtgcgtaagagacaataaattttgattttagtttgtgtttagttcataccaccattaaatttagtacaactgttaaatctgaccatggatgcatagtgtaaagcaaaatcaagtttaacttaactagtttgagttacgaagaaacaaaactccatggtgtgatcgatctccttagttggtgggagtatttattaaaaaaatgatttatagattattagtggcatgataccggaaattgttctatgaacatgttttatttcattcattactcacaagatgtgtgacaagattagaaattagtctttatcttgattatgacataaaagaagtcctatagtctgagtttttaaagcacacactatacgctctttataagaataaaaaaaagcacacaatatacgcttgtctttctcaccnnnnnnnnnnnnnnnnnnnnnnnnnnnnnnnnnnnnnnnnnnnnnnnnnnnnnnnnnnnnnnnnnnnnnnnnnnnnnnnnnnnnnnnnnnnnnnnnnnnnnnnnnnnnnnnnnnnnnnnnnnnnnnnnnnnnnnnnnnnnnnnnnnnnnnnnnnnnnnnnnnnnnnnnnnnnnnnnnnnnnnnnnnnnnnnnnnnnnnnnnnnnnnnnnnnnnnnnnnnnnnnnnnnnnnnnnnnnnnnnnnnnnnnnnnnnnnnnnnnnnnnnnnnnnnnnnnnnnnnnnnnnnnnnnnnnnnnnnnnnnnnnnnnnnnnnnnnnnnnnnnnnnnnnnnnnnnnnnnnnnnnnnnnnnnnnnnnnnnnnnnnnnnnnnnnnnnnnnnnnnnnnnnnnnnnnnnnnnnnnnnnnnnnnnnnnnnnnnnnnnnnnnnnnnnnnnnnnnnnnnnnnnnnnnnnnnnnnnnnnnnnnnnnnnnnnnnnnnnnnnnnnnnnnnnnnnnnnnnnnnnnnnnnnnnnnnnnnnnnnnnnnnnnnnnnnnnnnnnnnnnnnnnnnnnnnnnnnnnnnnnnnnnnnnnnnnnnnnnnnnnnnnnnnnnnnnnnnnnnnnnnnnnnnnnnnnnnnnnnnnnnnnnnnnnnnnnnnnnnnnnnnnnnnnnnnnnnnnnnnnnnnnnnnnnnnnnnnnnnnnnnnnnnnnnnnnnnnnnnnnnnnnnnnnnnnnnnnnnnnnnnnnnnnnnnnnnnnnnnnnnnnnnnnnnnnnnnnnnnnnnnnnnnnnnnnnnnnnnnnnnnnnnnnnnnnnnnnnnnnnnnnnnnnnnnnnnnnnnnnnnnnnnnnnnnnnnnnnnnnnnnnnnnnnnnnnnnnnnnnnnnnnnnnnnnnnnnnnnnnnnnnnnnnnnnnnnnnnnnnnnnnnnnnnnnnnnnnnnnnnnnnnnnnnnnnnnnnnnnnnnnnnnnnnnnnnnnnnnnnnnnnnnnnnnnnnnnnnnnnnnnnnnnnnnnnnnnnnnnnnnnnnnnnnnnnnnnnnnnnnnnnnnnnnnnnnnnnnnnnnnnnnnnnnnnnnnnnnnnnnnnnnnnnnnnnnnnnnnnnnnnnnnnnnnnnnnnnnnnnnnnnnnnnnnnnnnnnnnnnnnnnnnnnnnnnnnnnnnnnnnnnnnnnnnnnnnnnnnnnnnnnnnnnnnnnnnnnnnnnnnnnnnnnnnnnnnnnnnnnnnnnnnnnnnnnnnnnnnnnnnnnnnnnnnnnnnnnnnnnnnnnnnnnnnnnnnnnnnnnnnnnnnnnnnnnnnnnnnnnnnnnnnnnnnnnnnnnnnnnnnnnnnnnnnnnnnnnnnnnnnnnnnnnnnnnnnnnnnnnnnnnnnnnacaataaaaataaaaaaactaaaaaataagcaaaaatatttagaagaactaaaaatgctgacagttaattaataaaagactaaaaattacataattttttttgaataacaaaaaattaaaatctaaaaaaaattaaaaaactagaaacttaattaagcctaacggatcagagcattgtcattatttagttgtttccatgtcaatttatttctatataagaaaaagcacgacaactgccagataaataattctagtaataaattctctggtttggaacaagaaaatgcttattttcacccgatccacaatgataacacttacgtttcatgagacaaacatgaaaaattcttttagtggatcaaagatttaattgtcgcacaccgttttccagtactatataataacaataactaagaaagtttatattattaatctgcacattaacttactactctacataacttttgtaatctacacactaactactttgtctacattttattggccactgatggtggaacattcaagtaaaaaaaaaaaaaaaacataaatgctcttggataagaaaaggagaatcagaaccagaaataaactagaatagagctttgctcaaggctcacgccatcctgcaaatcccaaaggtcaaactctattgtgttaatacctttgcatgatgccactgccactaaccaaaccatttcccaatcataaccatacccaaaagaataagatgcttaaactaaagccatatcccgctcatttatgcaaacttagcataacattaatgcattattagaatataatgggaaagcaatgtgggaactttcaattctttttaccacaaatttatctctttggccttttcttcatccaacctcacctttccctttacttcttttttttccccctcacttgtttgtagtggggtgaagttcaacatggctttgcactgcatagattagacactgatgaatgaatctgtcctcccccatttgggggtccaaaagaatttcttcttttttcccacttcagaaaaaaggaggagaagttatcaacttgaattaattctattataatcacagctcagtactgtatagaaagtgattgtagcattatgtcaccttctctccttaaaggatgactgacactgacgaactactgtgtcattttcataagtgaatcaatagaaataatggtaaataaaaaaactcaagtgctggcaaaagcataaataatatctatcatgtcgcaatcaccttccattatgatccaatacagaattacacatattacagtgacacagtagtaggatcgttctatctgcatctcaatcatagcttatctttgtaccgtgtactattctaaattccgagtttcaacaattaaaggcaaaaaaaattgaaacccattacaaacttcttcgcttgtttcacctcttccagaaaattacaaatttataacaccgtctgatcaatttcatgccccactaattgtagctcgaccataaaaactccaaaaaaaaaaaaaaaagaattgctatcaaaaaccaaggttttaaattaccgttacagttttgttgcgatctttaatattacagaaaatttcagataaatgtagccgatacagaaaattttactaccacagaaaccataaaaccttgacgtgttgtgttgcagaccgttttataaaaccttgatgcatatgaaaacatactcaattatggtctaatataacttaaactctccaactggttaattacaaacctcatattatatggacaaccctatgtacacagcaacctttgcagaagcagagtaaaacattaaaaaaaaaagaagaggaattatttattttctctctatatattttgaaaaaatggggttggaagcctaaaatatgaggattataatataaactatatggacatgacatgacccttaggcaaaggttgtgatttgtgaaggaagaagaagaagaattgttacatatcagaaggtgactcagaaatgctctccaagtgaggcctccacacagcaacacgccctcttcttctgtctctttgcgttgacaccttctctgagagtatatcattcaagtagcgatcagaggcaagcaagctagtcatagacatagtcatggacacgttggtgttgttccttgttctctctctgtgttccttcttcttcttcttcctctgctggttcttctcttgtggaggagaaggagggagtggcatgaggaagtaaatcttcccacgttggagctctgcgtcgggtggcaccaccacgatcttggggaccccaccgccgacgccgccttcggcggcatctgctgcggaggagcacggcttcttgaggacatgtttggggtgtgccttcataacatcactggccttgatggtgccactgatttcttctactctgccattggagtgcactatgcggatcacgtcgagagccccacatgggaggatgcaagagatgcagcaccttatgcagtttctcatggctttttcttccctccctttttttgaattggtgtctcgaggaggagtaaataatatactgtgggggaggaaacggatttgactatttcttttagacttgagattatctttgctcctttctctggttttgctaatctttaattagagaggtgcgaaattcggtcgtgtaaatgaattgcgcatcaaaatgatccatcttttaaaggaaaaatataagttgttaacccctggaatcatgatgtttttttactactaaatgaatgtataaataaataacaaatatgtgtatacatatttagggtgcttataaaaatttcattgaattaagtcttgccgtctcaccaaagtgaggctagaccttacgattccaaaaatacttataaggatatctataaactatatttataatgaaattctcctattgacaaatgaattcaaactcatgaaggcatgagatatgaattttatttgtatctttatagcctactagaagagaatgtttatgattaaacaaagataatttaaataaaaattaatagaaaataataaatgtgcagattatgttttagataagaatatggttaataaactcacagaaataaaaatattctaatataataaataagaattatatatatatatatatatatatatatatataagatttcgccttatttttgaaatttgttattttttggtttgctgcttttgagtaggtgggaggaatattttcggtgctaggttgggagaaaattcatggcgtgaataattgtataacaccctgtagtttggcttttgatacataatttggggaccctaccctcatacctcgagttaatactctcttccctttattaagttcaataatattaggttgggaggactgaaagattgggataccaatggtatattaaacgatgggacttctcagcaatcaaaaacttaggaccccttttgaatgtgtcatgaaaagacatacgtgtctcaataaaaaagttgacacttgtagacccctgaatgaacaatattaattattaattatttaacgctaaagtttggttgagaagggtggtgaagtagggtcagtcaatgagagaaagagaacgtgttttggtttggagtgaaatgggagtatgagcgctgggaaatggggtacagcgtagaggaggtaggagagttcgtgatcgttcaatatccccaagcaagagcatgtggattgtggttttcattggaaagtaaagtgtaatggcttttaggtttgtgaagtgctttgactatggccaatgtgtttgtctactagccacatctccaagagcaacccttccaaaatgcttttatccgtttcgttttctttcttttcatacatggaatttcaccattttgccatctatcatacattatacattgaattaaagtcaagtacacctacttttctattctgtccattagtaccattaccatatagatattgatgaggtaatgatggtaaggcataaacattatctgtacagtagtgcaaaactctctttggggcgccgaagcttcaccagtaatcactttcttagataggtaatgagataatgattattaggtattgtctacacagattgtcactctataatgactcatatgggatccatgcaaaatttaatgacacagctcaaatcaaaattatggcagtaccacctgtgtacctcagaaagatacctaatatctatactagtagactactatacgacaagagatgttgctctcctttcctaactgttcaaattttataaattataagcgttaagatttcaacttcaaatatcatagttctcttttaaatagactcaactgaaactgaatgacacagacaaactcacaaacacgttatttttgtcatgaatgtcgccaaattgacattggatggtgtatgttttattccttgttatgtaaagaatggtagctcaaacttcaaagaggctttaagtaaaaaaaaaaaaaaaagaagttaaattcataagataatgacatccaagaaagtgatttgtcctaatctattagggaaagctaggaagtttagaggtgattgatgatatgatttagtatatgcatgtcttgttgcgttatggaactttttaattaatagccattagccaagccttgcgagaatttgccaaaagaagagatgcagttaaaagtatttaattacctgttaatttgagttatgtcacatccataatgtggcccgctctttaaataagttctgatgtagatgttagtgggcatcatgtgaggcactgagggagggtccaaagctgggctttgatattctatttgctctgatcatccaaatttggatgccaagttaacttcgttttattatgcgataagactgacttaagagattaacattttccttcatgagttgagacgagttctattcccccacgcggcactcgcattctttttttttttgttaaaaaaaaatgttatacttatagtcttatactgtacggtttaggagctcagacaggtcgacaaagtaaggacccaccacgtccttagtggagatccctgagtgacggttgaatggagtagttatctagttggtaaccttcttcgtcttatatgtaaggaaaaacgataaanaggagctgagacaggtcgacaatgtaaggacccaccacgtccttagtggagatcctgagtgacggttgaatggagtagttatctagttggtaaccttcttcgtcttatatgtaaggaaaaacgataaatgttattatcaacttgagtgtggaaattctattctaacataaggactaacatgacttgtgttggagtctcattgtaggtattataaatattcttagcacatgacggagtcttaattctgttccttaatcagtgttggagtgaacatattatatcttaggagacttgtatatcacgtagataaattaattcttcgattaatgaaatgaaaaacaaaatatatagtctctcaaagtgtagtctgtcattcaattaagttaatctgtccattaagtcttctacgataactttgaagagtttaaagtctatatatgtatacaaagactattttgaagagtttaaggttaaatatgaaaacttgcaagtcctttaatttatattagtcactaaatttattgtcatattaacctttgaatttgacatctactctactctcatacgaaattaaaaaacattccttgaaattcacaactaatattcacagtctaatataacgctgctataatttggttcatactagtctacatacactgatgaatgaattgcagaaatttgttaaaacaagcaaacaaagaatccagaggtattataaactgctaacctatgtcacaaagagtctcctccattatgtcaatgtgccaggataactaaaaagcagtacacatttacacaccgcaatttttttgtgcaaaaaaattgcagtgttgctctctgtttgcaatgagtttacaataagctgaagagattaaaggaaaaaggaagacgagaataaattattccttttttttttattaactatgtttttcttttggacttttgcgttatctcattcctatgattttctttttgggtccaacttttgtgtttgttattgatggactggattttaatttatcccattgatcgggtttgggctttaagataattatttcagtttggattttttttataacgggccacgtgtttcttttgaatgaattctattcagcaagataatttgttttttaaattcattttaatcgtgttaaacttattagatactagagtaaatggtgtctaataagttctaattatactttatctactattgaatttaaactaatgacttccgccgtatgaaagcaatgttcttaatcacttagttaaatagattattcttcaaccattggatgtagttcaatnnnnnnnnnnnnnnnnnnnnnnnnnnnnnnnnnnnnnnnnnnnnnnnnnnnnnnnnnnnnnnnaaaataaaataaaagtgcaaatgagaacaaaaaggatgaattttctatattgcattattgttatattaaagaaaagttttgtttttttaaagaaaaaagagaaaaaatattttttctattgtttgatcataaataaacgaaagtaataagaaaacttcttattaaataacatttatatcatttttaatatgatgatgaattttttgttttaatgaaaacttctttctccttcattttctctctcaaattactttttttttttaagttccattttttcccgttccccattgtttccttttcagtatcagagagagcatctttggtttgaagttgaaaaagattaattgaatttaaatacattttcatatatttaatttcacgctaaagaagaattaaaaattaattatgaggtcaaaattgatttaggattgaaataattttaaataacatttgcattgaatccaaaattttatactaaattttactnnnnnnnnnnnnnnnnnnnnnnnnnnnnnnnnnnnnntacaatccaaaatttgtatgtcattttccttctttgcatttattttatttccattcactttaatgtcaaccaaccaaagcatagtgcattttttttatttatttacgccaatgtaaacggagaattttatgttgtcatttttactgttggcataagcatcgcacaaataaatacatgaacaaaaacattctatgaaaaaatataatctttctaacagcatcgttcttttaaagaatgtgatatgtttctacattttcttagcatcaaattgatctttgtttggtaggttgtaacctgtgttaacttatgtaagaaagataagtattgttttagccttttaggtgcagagtatattttgtacgttatgctatttgtggaacggagatagtcgatcatcgctttatcttggccaatgacaaatcaaatttggcatgaaatgtatgtttgtattgattatacaggcatttacctaataattaacatctcttatctatacatctattttaattcacttttgagaagagaaaatttatcttatgttggtcatcttttttggtaagccataagtctatttaaattgtgtgaaacaaaaatttattccagtgatcaatatatatttatttttctgattgctttttagatcctgtaacttgtttctatttttcttttttatttgacttggttatatacaaattaaaatactccttgaactatgtttttttagttaattcaatgcgctatatatatatacacactactataaagaaaaatacaatgatgaagcatgcatgttgaagaaaacgcttgaagcaaagaaaaaaccatctgcgaatattttaaatcacatgcaacagaggcatggttccattttctaccttcacattatttgaagaaaaacttgttctgtgttttatttttgcctttcacattagtacaacgtggaagactatggtcacacagaatcatatcatacatacgtccgatgcttgtctctaagaaaacaagcactcgttgattgaaccttaacggctcaaagaggagagtgatccactcttctatgagctttgttaacgccagcagacactagtgtttctggtgtttctgatttctccttagttgggtatgaagcgaaataattcatcccacacactcctaataaattacccgtgtttctttggatccaaatgtaaccatcttttccccaatcttccccccatgaatttttcgctatccagtaatctacaccatcagctgaaccatatcccacaagtaaaacaaagtgattaatcccatacggacttgtacagtttcctccatcataaattccctgtacaaatcaataacaataatagtataataatgatataatattttcccaaatagtaagatattgtatatattactgctagtaattagtagctttgttctagaacctgtgacatttgaggaaaaatatttgtcccataagtattatatttaacttttcaatataattttaattatttttattaatatttctcataaatatcactttaatttttaatataatactaatattattttttcatttatttaataaagttaattttacaaaattattattattttttattaatttatgagtttttttttgtctgacttaagacaacacagaatatatattacttaccccagtgtagagatgaaaatcttttgcatctatggagacactaattggttgctcaaggatggcgcataagaacgctttctctgtctctgattctgtactctcatctgacattattagagtttcatatccgtcaattgtaaccttgtcttgtatctactcccagaaagaaaaagaaaagtgcacaaaacaaagagatgaagggttaaattaattaaaaggaattgcatgcatgcatattcagttaggtattcacagaccttattggctttgcatctaccctctttagctctgtaaggataatcagcatcagtggcaatcccaccatgttctaaaacccattcgaaagattgatagtgccatccattgtaacaaccttcgctttcttccacacaatctacgagttcttgttcagaaaggctaacaaggtctcctgttgctattgcatgtgctgcttcaatggctcccgtggcagaaaatgcccacccactccctatcaaaatggtttcacactccacaagtcattttcaaagagagaaaaaaatattagtgttaataattagtattagtaattacgtactaaaaacaatggtttcatgcacataccacacgagccttggtacttgacatcagtgatgacaccctttttgctccaatcccagtattcaggtgcatcctcacaagaaagttgttctttcttcaattccttgttggccatgttgatgtgtcgtggcacatccttgggagcttgcaagtactttttgctgaactcttgaggagtgatgtcagcaaacttgttcaaccccaaacgatgagagtggggtgattttctgtttgcattcacgtccctgatatagttcaagttattcttgaaaatctcaagtctcgttgcctcttcttcttggttatggtagacccgtccgtgtgcactcttccatagttggaacagtgaagacacctgtttctgtgtggtgaacttagctaggtcaaggtccaatatggaacgatgagatatgctggaactagaagagagacctaagagggagaaaagaaccagcacaaggaaacccataacttggtggaaagtttttatggcttgaaattaagatatggtcacttcacttgtaccatctcgtatatatagtgattagtgagctagctagtaatgactgaagaagttcccacgtagttatgtatttggtttaaattaatttctgatacgtaattgaattgtgatttggaaaaatatatttaatttggacacccaaatgcttagtgagagaaaagagaaaattaaaagagaaaaaatataagtataataagtaatataatgtgatagaaaataaatatgaagaaaaataaaaatataaatggggtgtctagagtagaggaatgtctaaataataacactcttatgatttggcttacaaacatgcaggagtggagtgacagttcccaactttttttatttttaaactagaactttcgtattattttgatatgaattttcattatgcagcaggcacagttccaaagccagtctagccagatatcttttgattattttggattataaaattggatataattctctttctttatttaaaatttatctctttctgtaagttttgtgctaacacaaaatgatttttcattatatataaattaaacttgtatatacccattttaaaaaattcaattgacgttaaacgtgtattctatctgatttcgacttttagggcttgaatcacgatgttttttatttatttagttataattaatttgatgtgaatgtgaagtagggcatttttcaaattgtagcctcactataaccatacttgtttcggtttgttaaaatttaatcaagtgaaattgcagcttactgcacccagttgggtttcaagcgtatttttatcagcttaattaattatttcaaagttgaagaagttttagagtttttgattatttttttttctcaaaaataatctatatatttatttatatgtccgacggcaatgtgtgtctgaagtttaggtatttggccgcatttgattgttatttgtctcaggtttagatcatatgagtctttccttcatttggttcatatgcaatagttacactcatttaggttacttaattagcagggccaaaaaaatatagcataaagcaataataacgcatgtatatagtgatatatatatatatatatatatattaaaaaaatagggcatatataaattgaaaggaatattagtatccttaatttacttgcatgcacttttgtctcactcacacgtgcaaaatcgaaaaatcattcaatattgcaggccttgcactcaaatgtggtccataatggacactgcattcaagatgatgtgtgatataattctggcttttgtttacagaaaagtctgcactgttaaaattattgttctataatcaactgaagttttgtccattttttaaagtgcgtacacgtcttggggaacgatgaatcgttgataagcagcgagcctcataagctagaggcacatcaccttcatcagcgttagtgttgtttgcacctgcatgtgctatttgttattttagttggagttttagtaataagacaatgggacctgctacaactcaatgtattttgagaggtttttttaattagcttttaaattatatcaacattttcagttttagaaaaaaaaaattagtctaattaaccaaattagtgaagggagaaggaaacgtgcaagaaatctcttaagtaaaataccatgtttaaatctttttagatgaaaaataatgattaacagaaaaaaaatcttattaaaaatagttagttaagtttacagataaataatagtcttaattaagtaaaattattggatagtctccactgttatcatgataaccttaaaactggaaaaaagaaaaccttggcgtccttcttcccctgaacctaaaatgacaatcaaaatcatgtccacagacgaagacattttatcctttcttttctcctaaacatagatagaatcacgcccaactcagtaaaaggtacataacgagttcaatttcaagagaatcaaggcgaatgtgtgcgtcctgaataaatcataattgtgttatatgagagttttccattataattgtacgtcatgttattatgaggattgagggttgttcattcggccaaggccgatcttgactggccttgtattgatccattacgcattaaaaaaaagaaaaatatttataggcatctttggattgtgaatttgatctgctggtgagaaaagagagaatgttagttttttattattcatagtaatcaaactcaaccattatgaggtttataacaatcacaaatattactcaaccaactaaccattggttaaatatatttaaagcttaaaatgacagattgcactattaaagataattagttaaatatactttctggtaacttaaaagcgtgaaatattgattagttagaaatatattttataatttaaggcaacattcttaattattattttattttaaaaaatcttaattagcgtagttaaaacatttaattattttaaattagaaaatatacttgttctaattaccttaatttctacatttatataatttatgaattaaaaaatagaaaaaagaataaatattttcgtgctcaattgcattacttttattataataaaaatgtattaatagtttggattttgctgttactctatcaaagttacatgtcatttgatctctcccttcaggactaagcttgactcttgaagcttttatgtgtagttgtgatattattgggtgtcgtctttaaaaaacaaatcaacctttcgacgatatacagctagcaaacgggaaaaactaaacagggcattatacacacacatattgaaacacatgcaacagtagcagtgttctattttatttatgaattatgagaaaatatagttgtgttttattacacagaatcatatacaaatatacgatgcttgtctctaacaaaacaagccctcgttatatataattaattggaccttcacggttcaaagaggagagtaatccactctttgatcagctttaacgcgagcagacaccagtgttgcagctgatttctctttggttggccaagaagcaaaaaagttcatcccacatactcctgctttatggcccgtatttctttggatatatccaaatgtaaccatccattccccatgaattttttgctatccaataatctacaccatccactgaaccataacccacaattaaaacaaagtggttaatcccataatgacttgaacagtttcctccatcatatatgccctacacaaatcaatgaattaataaaattattattttttatatataacaataataaactcccaaatatatactaagatattacagttataattacttactccagtgtaggaaaaatatcttctcagtccaaggccacactaattggttgctcaacagtggcgcacaacagtgctttttctgtctctgatggtgtagtatgatttgatagtattagaccatcaaaaccgtcaattgtaaccttgtttggtgctaattccagaaaaaaggtgcgcaaaacacagagataaagcggtaaattagtaagttagttaatgagttatattgtcaaaaggtaattaaatgaaagagggaatggattatggaatcgtacatattcaattcacagaccttattggctttgcaagtaccatttttagctggataaggataatcaacttcagtggcaatcccaccattttctataacccattcgtatgcataaaagtgatatccaccgtaacaaccgcggctcttattgacacaacctacgatttcttgttcagaaaggctaaaaaaaggtttcctgtcactattgcatatttaaaaaatgcattttttgcttcaatggctcccgtggcagaaaatgcccaaccacttcctatcaaaatggtttcacatgtacactccacaagtcatttccaaataaataaaaagttgaaccaatgttattgttaattagattatcttcttacttttgtaaaaactctcaaatatatttagtagacaaacaaatattaaaaatgcaaaactgttttaagcaaagccttagtatagttctaatgcaattgtttatattggttcttaaaagttaaaattaagagacctgagaatgctattagaacaaattaatgaattctttaaagtgcttacataagttgcttggataaataactgcaaacaaggttgcttaatcattggaaaaataattttcccaagtcaaaatttgaattgttgtgtatgtgaaaagataaaatgagactgatcaataaaaataagttaaaaattcaagttgaattctatcatttgaatgaaaattattgaatatttttaaatcttgtataagaataagaggcttattaaaaagaatgataatattcgtacactacaaaatgagatggatttggtggaaataattagagagagatggaaagaaagaaaaatgtagatagagaaagtaatggatgcaatatataaaaaataaatagagatagacaaaaaaatatggtgaaaaagggatggaagaaaaagtagatgaataataagtattttcctgctaaaaatgagaattaagaagctaaattaatttttttcaacagaaggcttcttaataaaaacacatgccacattgtccttggtactttacttcggcgatgacacccattttgctccaatcccaggatgcaggtgcatggtcgcaagaatattgttccttcttctttatttccttgttggccatgcatgttgatgggcagtgacacatccttgggatcttgcaagtatattttgctgaactcttcaggtgtgatgtcagcaaactagttcaaccccaaacgatgggagtgggcaatggcggatctaggttgataattgggggggggcaatgccccccccttaaatatggagcagagagaataatgttggtggctagtggaaaaaaaaaggcataataatggcagaaagaacaatgccaaagagaaaaggaactgcaatggtagaagtagaggagataagaatttgggtctaatttacttttcgtattcacattttttctttttacagtttcatattacattttcaaaataagcttttgaattttaatttagataattgctatttatagtctttttattattaatacactttacttgtattatcaaatttaattgttattttgtatttttagtatagaattatagataaattttcttaattaaataattttagttatatatataatataattttaaacgaattcataactttatacataaaatgttgatttaaattttttttacaaaaatttttttcgggggcaacctcaccactaaatatgcagacataaaaaaattttcttaaaggtttgagtgcccctccttaatttattttctggatccgcccctaggagtggggtcattttctgtttgcattcacgtccctatatagttcaaattgttttggaaaatgtcaagtctctttgcctcttcttcttggttctggtagacccgtccatgctccttcttccatagttggaacagtattgacacatgttcctgtgtggtaaacttggctaggtcaaggtcgaatatgtaacggtcacttgggatgttggaactagaagaagaagaagaagaagaagagagacataagaggggaggaaagaagcaacaaaaggaaagccatgatgattagagggtaacgactgatgaagttcctacgttgttaggatacaataatgattattatcctaattacatatgtggtggatatgtttttggtttgcatttgcggtatttaattgtgattaggcctacaatctagctatagctatagggagtgtcacacaccaaaataacaagaattaatttttaaattaagcttttgattgttgtgggttatcaaattgaagatagatctctttctttctttaagatttatcactttcagtaatttttgtgctaatacacagtggattttccatagaatataatcaacttgcccgtagccattttaaaaacattcaattgatgttaaacgtgtaatattctatctgtttgtaacatttaattagtgcgcttgaatatcattttaagataaaataaaatagtatagacaatgacttatgactctagctctctctctctctctctctctctctctctctctctctctatatatatatatatatatatatatatatatatatataacaccttttgtttacataaaagtacatactgcactttttattatcaggcaaataagatatataacaatataagtacagaagggtaccaaaacccatatagaagagatagcccttccaaggttaaacggtatttatatgcacatgaaaatataaatacaatctaaccaggaagaagcccaaataataacatcagctatccaacctaataccctacaaatgatcccctctaatgttcacagaataacacgttgcacccaaccaggcttcccaaaataaatggcatttatttataatgcctaacgccctctgataggacttgaatagtttaaggttggcacaaaatgagcaaataacaaaaaattttaaattagaagttaatttttttattattgtgggttataaaattgaagataattttctttctttaattaacatctgtctctttctgtaagtttcgtactaatacgaaaggaaatttctataaaattatcaacttgtatgtactcttttcaaaaacattcaattgatattaaacgtatctgttttctagatttattgaccaaataacaatatttttctaattaaaactttgtattcttttgattattgtgagttacaaatttgtagtttgctttctttctttaagatttgtttctttctgtaaggctagtgtgaaatgaaatttctgtaaattatcaacttgtattatattaccccttttaaaaacattcaattgaagttaaacgtgtattcttatctgttttatacaattaatgcttgtataatttgaaatgtttatttctttagttaatttgatgtcccgcaaatcctatgtttaaagccagatggatggacaagaagtttcaagcttgaaagcaagtttcgtacgcacaacagccaaactattagatttcgttcccctgcccggtgacatctttcctccttaagccccacaactagaaaaggagaaaagcaaaagactagtccactaagaatagccctagttaggatctctgtccccttcttaaactatggcatgccacctcttctactgcaggggattctcgaacaatgaaaagcccgtatttttgtcctaccttcatagaagaagtcctatgtcgtctgtggaacattccatacaaaatattttttcaaattttagcctcagtatacaaccataattatgtttatttgaataagcttccataaagaaaaaaaaataagagagagaaaaaaaaggtaatacactaaaattagcttatatagatgcataaattacaaatattttttttagagaagttatataaaaaacttttataaattcagttatgcagaagttaattactctcctctttttatttaaatttataatttttatggatggatcatccatgaaataatttttaatgaatgaattagataaatttttgttaaatggattggattgaaacaaaaatttaaataaatttttaatagatcaaaatgaattaataaattattttgatctgattcattttatcatccctatatataactatatttaaattaaacagtaattcacacactatgtagtcgagtgtttttattatattaataataaataaaaactcttttagtactttaatattttgaaatatttattgtcatagatgtgaagtatacttttcgaagaaaaatgattattaaacactctttggaaataaagttattaattcgattcatgatataataaaatagaaagagagatgagaaaaaatagaagtatattaataaatatttgtaatttgtgagtgttaaatcacgatcaaaaccactaaactcatgacanaggatctataaacaaggataaattaaaaggcctccaaattaaaagagtaaaggtttccttcattaaatatctacgagattatatttattaataaatataagtgcaaaatttcatcaccaataacatgtcttgttgacattaatagagaccatattgtgatcgagaatcacctatttctttttaatttctcttaaattaaatatttttatttgtattttatttatcacattttcatttattattttcatcgactcagtcacctatttcttttcttccttaaaaaaaggtcgtacagtaaatatgtttaattacctaaacttcatacacacatagttgccgtcgaacatatatattaatcttgactcattggtgtcttgatgcttttatatgtgtagttgtgtagttgtgatattattaattgggtacgtgccatctttcaaacaaataaaccccttcgactctacccagtggagaaaaaaaaacggtaatattcctttcacgtagtcgagtaaaaggaaatacactggagaacctatgaacgatgaaacatatatggtaaagagaaaggcatgaagcccagaggatatctcaaaacacatgcaacagtggcagtgttctattattgactttcacattatttgaagaaaaattagttgcgtattttatttttgtcttctcacattaatacagcatggaagactcgtgatcacacgcagaatcatacatgcgatgcttgtctctaagaaaacaagcactagctacttaattaattggaccaccttcacggttcaaagagaagagtaatccactctttgatcagctttaacgcgagcagacaccagtgtttctgatttctctttgatgggccaagaaacgaaaaaattaatcgcacatactccaattgggttactgatatttctttgaatccaaatgtatccatccattccccaatcttttccaaatgaattttttactatccaataatccacaccatctattgaaccataacccacaattaaaacaaagtggttaatcccatacgtacttgaacagtttcctccatcataaattccctgcacaaatcaatgaataaaaataacaacaacaacaacaacaacaacaacaacaacaacaacaataataataataataatccccaactatttaagatataatatagtaattacttacaccagtgtagaaatgaaaatctcttgcgtccatggccacactaataggttgctcaagggtggcgcgcaacagtgcattgtctgtctctggttgtgtactatgatttgatattattagacctccaaaattgtcaattgtgactttgttttgtgtctacttccagaaaaggtgtgcacaaattaaacaaaaagatgaaaggcaagagtaattaatgggttatatatacacaagctaagttgtcaaaagaaggtaacagataccttattggctttgcatgtaccatgatcttcagctgtgtaaggataatcaacttcagtggcaatcccaccattttctataacccattcaaatgcatgaaagtggtatccaccgttacaactgttggctttatagacacaatctgtgatttcttgttcagaaaggctaacaaggtttcctgtcactattgcattttttgcttcaatggctcccgtggcagaaaatgcccaaccatttcctatgtatcaaaatcgtgtcacactccacaagtcatttccaaataaaaaagaagttgattagtattgaaaataagcatagatcccacgattccttatataagtcaaccttttgaacagtttctataggctttactagctaattattactaacataataacatgcatcacataccgtatagtttgtgagttcaatcttctttaacaaaactaacattctaataaattaatattaatcaataaaaaaaatagtaacatgcatcacataccacagtccccttggtactttacttctgtgatgacacccttttccctccaatcccaggaagcaggcggatggtcacaagaatgctgtttcttcttcattttcgtgttggccatgttgatttgctgcgacacatccttggtgtcttgcaagtactttttgctgaactcttgaggagtgatgtcagcaaacttgttcaaccccaaacgatgagagtggggtgattttctgtttgcattcacgtccctgatatagttcaagttattcttgaaaatctcaagtctctttgcctcttcttcttggttatggtagacccgtccgtgctcactcttccatagttggaacagtgaagtcacctgtttctgtgtggtgaacttagttaggtcaaggtccaatatggaacgatgagttgatattctggaactagaagagaaacctaagagggagaagagaagaaacacaaggaaagccataactcggtgaaagtttttacgatatgtttgcttgttaagaaggtctttgcacaattcatatatatagtggttacagcttgtttgaaaaccatttcaaagagacatttaatttgacgtaaaaatcacatcttgactgaagccggcaattattgcttccacatttttttttacgagaaataatacataatttattctttattttaaatctattatcaatattattatttttatctatctctatctattttatcataaatcataattctatcatatttaattatttttttacttttttttaaatgtgtagtctatctgtctaatgtatacaatgtttacaatgtgtctggtaacaagaaaaaaattaggtgacaaataaaatgaataaactagatgagagaaatagaatgaaattaaataaagacattcgattgaagataagaaaaagaaataaggaaaacagaagtaaaacatttttttaaaattttaaagttaaataatcaattatgaaacactgataaattattatgaaaaaattgataattgattatgaaaccattcgtaatcaactagcaacggagaacaaatgatttcatgtataaaaaaatgttcattatcaattctgaatcattgataatcactgaaaacaggtttattgcacaatttttgcgccaatttgcagagaccacgtttttatttctttcattctttaatttcactctactaagcacactatcttttttatcaatcatttattttctttccctcttctcttttttttctctatgtcactcctacaaacaaccgtaattgaggagaggcttcggttatttgaaacttgaaagtgcaaatgattgttggttatagcaaattcagtttaggtccgtttatttaagcttatttaaaaaaaagctttattgataaaataagaaataattttctttttatgtgttacttaaattgtttttaataaaaatatttttaaaaaacaaattttatctacttaaacttttaaacaaattattctaaaactgttaaaatacgatttcttctcttgtaaaaaatataattctgcagcggtcctgcccggtctactacatcagaaacggtaccatactatagctacctatatataactatatttaatcaatccacgcgttatgcgagtgtcttttttttcatattaaaaaaaaataatgataatgacttttagtactagaatattttgaaatgtttatttgttttgtccaataatttgatgtgaattaggggctaaaagaattcaaataatacaatattaataaaaaaaatattaatttgagactgtttgtaaattatttacgaatttggaatagtaggtcgcgctcaaaattgggtgtgaccagtcccgcttgaatctgggtgtgaccggtcacgtccaattttgagcgcgacccactagatagcaacacgtgtcatgacaaatggagtaatgcgtatataaactttgaacgatcataacttttgactggaatgttcgattgaggtgtagtttgtgtcaaaatgcttgaaattgagaggagaacccctgagcaagttcctaaaggtgacttgttcaaaaatgttctccaaaagaggcctctaagtgcctcaaaattgcgattcaatcttcgaagtcccaaaaaatttcttgtttttctaattttttaattattttgttagttaattgcatgctattttttattttttttattgtctctcttaatttcgatcaaatgacctatcgtacacctcgatcagacattttcatcaaatgctctacgatatgtccgatcgaggtgtcaatgtccgattgaggtgtacgatatgtcaaaatgctcgaaattaagagagacaataaaaaagtaaaaaatagcaggcaattaactgacaaaataattaaaaaattataaacaaaattttttttggaacttcgaagattaaatcgcaattttgagacacttagaggcctcttttggggaaaatttttgaccaagtttagggacttgcccaggacttctctcaatttcgagcgttttgacacaaactacgtctcaattggacattccaatcaaaagttatgaccgttcgaagtttatatatgtatcgctccatatgtcatgacatatatcgccatctggtgggtcgcgtccaaaattgggcgtgaccggtccagattcgtacatagtttggaaacaatctcatattgataaataatttataaataattttaaattgataattttttattaaaattgtattattttggttcgtgaaataggatatttttcaaattaggaacatcgcctcatcagcgtaacgtgttttgttgataagctttgcacctgcatctgctatttgttattttagttggaggtttgggaaaagacgcaatgggacctgcaaggctgcaacaacttaaaatgcaatttttctttctttcaatgtatattagcattttaattttacaaaatcttcactctaatagtttgatttgatgaactacccacatgcatatccaatacgtaagacttatcaagtaaatgtcataaataaaataagaaataaaaaaattgcagcaggtaacaacaaataaagaacgtgtaccttgtggtatggaaatgtggtaggtaggaaccaaacgagtaagaaataaaacaaaataaaacaaatattttgttcagataatatttaagaaaacacaacaactttttttcataaattaaaatcaatttatacatatataaaaattaaaatataaaaattaatttttaataaaaaataattcattttatctctaattttcttctaatgtttgtatgaggtttatttacacatgtccgaaaagaactaattaagctccttttcttcaattaattttctattccgaatttggaaatatcacaatcaaatgagatcagagagtttctcgtagtcttctccttgaagcttctcatatcacaaaagcacattgctcggataaggttgcattaataaagttatgtgtttctttctttggtttttgcttcagctttgcaagtatttttataaaaaaaaataaaaaggaaaaaatgtgaagaatttttttataaataaaaataaattttttattaattaatttttaaaaatttactaatataatttctctaaaatataagatgacatttataaatgaattaatgaaaaatttattttaatttatagaaaactttatttcattttttcttaattttttcttcaaaaaatatttttagaggaactgtgagtgtattacttttatcctatactttcatttcatgtcatgttcatcgtaccctccaaagcttttcgttacaccattgtcttagccaacactgcctctgctctcctctctgtctatttaaaataaacaaatatttttaatatataaatttatatataattaaaatttatgataaataaatattttaaatgtataaattatattttaaatttataataatcataattttaatcgcaatgtaaaattatttttaattattaatattttgataaaaaattatcgaaactaagtttagaaacagttatatatgagtgtgttggatatgtcagtctagtaacttataagttacttcaatcaaaatactatagaaataggtgaagttgttcgactggaatttatagcttaatttatattaagccaacattagattagggttttttacaaaataaatttagccaaaaagaaaattaaattatttaatcaaataggaaagttaaattttgtcattaaaaaaaaattaagtctaactaacnnnnnnnnnnnnnnnnnnnnnnnnnnnnnnnnnnnnnnnnnnnnnnnnnnnnnnnnnnnnnnnnnnnnnnagcttaatttatattaagccaacattagattagggttttttacaaaataaatttagccaaaatgaaaattaatcttatttaatcaattaggaaagttaaattttatgtcattaaaaaaaattaagtctaactaaccaacttctttaagtaaatataaaagccatcagaatgtaaaacaacccaaaaatgtttctttacttgtgacttgtgagaactaggccaatagcaacttaacacaatcaataccgataccaacagttttaataaagagtataaaattaagtaaggaaacaccaattttttagggctcatttgtttaaaattttaaagaatcacttcttttttaaaaaaaaacactgtatttgttacaaattttcaaaacaagttaaaaggaattagaaatattattataatcataaactattttaaacatatgttggaagagattaaatctttaaatggatttcaatatctaaggagattagttattgtctttcaatcaagaaataccttagttcacccaaaaattacttcttttataatctgaaacaaaccgatccttaatgagaaattttttcttgtgagataacaaaaactatgacatcaaatttagcaaatttctgagtataaaataatgggaacatgactacatcaacaaaatcaccgaatgaacactaacaaaaatgattttttttaatgaaacaaaatgaaaatttaacacaataaaatgcgccacgaaggtaatttggctagaaaaagaaaagaaaaatgaaacacaaaattaaataaaacatatcataataaaactcttaataaccagtaactgaaacagaacatgcttactttatcaacatctactcaaagacactaataatcccttcatcttctgacactaataatcccttcatcttcttttcactggactgcgtatcttctaaatattcttctgacgaagagtttgtattttgtttatgtatcatggccccatggggcacctctcctctccccctccatttaaatgatattatccttttaaatgggcctttcggcccaacaaaacaatatatcataatttttagggcgttgcttcctacaccccgtatggcagtccaaattcattcgttgctaccacacccaaaaacatcaattttggtttgtctctctttacgttgtgagttgtgagttattgggttgaagtcgttatgagacagtgaggtttggagcactaatgacggtgaaagagttcaagtagttttcggaggcactttggagaggaaaaggaggcacatgggcacatggccatgaagaatgatgatgattccactttaaattaagggaccccataataatcctgaaaaccataaataatatttatctcgtactcgtacaatctaagcccttgttgttcatcaccaaaataatctaaccccttgtttaataaataatagataaatgattgttacttattagtttattgggtaaatagtttaatttgtaaatatgtaaaaataaataaaataattaaaatgatttatatattaaacaaatttacctaatttataaatttgtataattcgaaaaaaataataataatgtttacaatatgaaacaacgaaagcaagtttcctactgatttagtgtttaattttcttctcgatttagaaacggaagatcaaaattatggatggaacattgcaaggacaaagaaaatgtatnnnnnnnnnnnnnnnnnnnnnnnnnnnnnnnnnnnnnnnnnnnnnnnnnnnnnnnnnnnnnnnnnnnnnnnnnnnnnnnnnnnnnnnnnnnnnnnnnnnnnnnnnnnnnnnnnnnnnnnnnnnnnnnnnnnnnnnnnnnnnnnnnnnnnnnnnnnnnnnnnnnnnnnnnnnnnnnnnnnnnnnnnnnnnnnnnnnnnnnnnnnnnnnnnnnnnnnnnnnnnnnnnnnnnnnnnnnnnnnnnnnnnnnnnnnnnnnnnnnnnnnnnnnnnnnnnnnnnnnnnnnnnnnnnnnnnnnnnnnnnnnnnnnnnnnnnnnnnnnnnnnnnnnnnnnnnnnnnnnnnnnnnnnnnnnnnnnnnnnnnnnnnnnnnnnnnnnnnnnnnnnnnnnnnnnnnnnnnnnnnnnnnnnnnnnnnnnnnnnnnnnnnnnnnnnnnnnnaagcagccaggaaagaatccatactttatgaataattttatctttttatatcgacaaaatttgagtttcatttctatatattggtaacaatgtaatgaatttttaaactattaacaagtaaagaatcataataaatatgttttttttttcttttatataaaaagtaacctttatagttacacttattttatagtaagtttatagaagtcaataaacttactctaatgataacttttttgactaattgacaatatcaaaattcgtttatagttaaatttatttattaaagtattaatgtttacnnnnnnnnnnataacataacaaattaatataaaaaagtttcataccgatattatattaaaattaaattgaaaattattattattattttaaataaattgaaatatatttttattagcatgattaaattctattaataaaatactatagtggggacattttcttgaaccactaatcattagcgaatcttataaatttaatgccacaaaatttaaataattaaattccgctggttgttttcccaactcaacaatacattatcattacattctattatcgtggacctaaatttaaaattaaaactctttattcaataaaacatttactacatcagcaatatagaattattcataagtaatattttgtagtaccatatatgtacttagaagcagacaatacattgttataattaaacacaagtgaaatggtaaggcacggttggtggtgtcctctaaacgtaataatttatttactcataaaaacaaagaaaagaaaaagtactaagaaacatccgctgcacctgcactgtgtccgttgccagagtcaatgattaagtaactacgtcacaaacaaataatcagcacacctaccaaaaataacaaatactaaaatagatggaaaatcatttattttttctacaaatagcaaaaatcttctgcataaaaataatcatttcgaataagaaaataattattcactacctaaattgctaattgtgttataaaaaaatctataatgttaatttaaacttaataaaagagataaaagataaataaaaaaacttaattacattaaatttttaatgttaatttaaagaaaaaataatataaattaaatggttcatttcattacattaaatttttaaaatttattttgattttatatatttttaaaatttttaatttgattcttttttttccattaaaaacatcaagataatatcctgttaatatttaaattttaacgaaatactaaatataagtataataattaatttaaaataatcatgattaaaatgattaattattttaatatttaaaatgattaattattttaaaatttaaataattaatcatttcagtaaaaaaaaaatccacactttcaatagtaaatccatgaatatgaatgaattattttatttactttaattttcctacacacaatacaacagtatcatcaaatgaaacaatttaataatagaaaccacacccaccaattccatagcttcagaactccaatgaagctccatcaccactagcgaacacttccattgtttttatctcacaggatcaatcgatatcaccagcaccaccatggaagaggtggcgccgccgccgaagaaggaaaacccgaaccttctcctggggcggttcgagctcgggaagctcctcgggcacggaaccttcgcgaaggtccaccacgcgcgcaacatcaaaaccggagaaggagtcgccatcaagatcatcaacaaggagaaaatcctaaaggggggtttggtctcccacataaagcgcgagatctccattctccggcgcgtgcgccaccccaacatcgtgcaactcttcgaagtgatggccaccaagaccaagatctacttcgtcatggagtacgtgcgtggcggcgaactcttcaacaaggtcgcaaagggaagattaaaagaagaagttgcgagaaagtactttcagcagttagtttccgcggtggagttttgccacgcgcgcggcgtgttccaccgggacctgaagcccgagaacctgttgctggacgaggatgggaaccttaaagtctccgactttggtctcagtgccgtgtcggatcagataaggcaggacgggctgttccacacgttttgtgggacacctgcgtatgttgctcctgaggtcttggcgcggaaaggctacgatggtgcaaaggttgatatttggtcttgtggggttgttttgtttgttctgatggccggctatttgcccttccatgaccgtaacgttatggctatgtataagaagatttacaagggtgagtttcggtgtcccaggtggttttcttctgaacttacaagacttctctctaggcttcttgatactaaccctcagacaagaatttctattcctgaagtcatggagaatcgctggttcaagaagggtttcaagcagattaagttttatgtggaagatgatagagtttgtagttttgatgagaaacagttacttcatcatgatgatgatttggcaacctcggattctgaggttgagattaggaggaagaatattaatagtaatagtagtaatgcatggtgcgctgccgaggcctgcgagtttgaatgcgtttgacatcatatcgttttctcagggctttgatctatcagggttgtttgaggaaaagggtgatgaggcgaggtttgtgtcatctgctccggtgtcgaagattatatcgaaattggaggaggttgctcagttggttagtttcactgtgaggaagaaagattgcagggtgagcttggaggggtgtagagaaggtgtgaaggggcctttgactattgctgctgaggtttttgagttgacaccttccttggtagtggtggaggtcaagaaaaagggaggggataaggccgagtatgacaagttttgtaactctgagttgagacccgcgttggagaatttggggatggaggaatctgcttcttcttcttcttgtcatcaatctacacacattcaatctgaactccaacaacatcgaacactttctgactctgcacttaacagacattcagataatgaatgtttatacgaaccagagttgggtctagcagacgagactagtatctcgcaacatggtgaatcaaagttagaatgtcaacaggaaaatatggccatgtttactatctgatcatgtcttgggctctataattgtttccaaagaacgaaacatatcggaaaccaaaaaagacaatgaatgcttgcattaattaaggtagcaggagaatgacagaagatgatagcatactaattctctcttgttattttaggctgtgtgtaagttaaattttactttctttttccctcaagaattttccggcattgttaggtttgctccttgactggagcattagatgctactgtctttgtatgtccaaatgttgtatttctgtaaggctaatttaatttaaatatagtgaatgaagtgtacatgttcacagttcacagttttcatgtcttggtaaattgctctgtaactgtatttattttctttctttattgcaagtaatgagaaaataataatgcaactttcttgtgattccgtgaggtattgcactggatttgggtgtctagtgcttcatattaactccatatattcatcaccttaatttggaatgagattgtgggaattcactctaatgctatatttggtaagaaggaaagaaaacaaagtgaaaggaaaacacgaacaatataatttcttttatttgaatgaagagaaaataaataaaaaaagaaaaaaaattgatttataaaaataaaaatttaaaattttcttttttttattttttttttaattcaaattttaatttttttttcctttccactctctttctcctataccaaacataggctaaagagaggaatcagaatgtcataacaacaacaacccgtcctagtatatgtaaccaaatcaggtcaagatttcatatcggtgtaaagggaaatgaaagccttatggcttatactattaaataaagaagatttccttcactgtttctcgtttaaaataagtgatctattttcccctgaatcatgctgatttccagcgcatttcttgttgatattatattttaaacaatggaacaaagtgaaaagcaaatactcatatgccagagtagagaaaatgggagaaatatgccggatttatcaacatagatgagattcactcaattctgaaagcattgtagagcattgatcaaatgaatgataaatgccctgaaaatccctcctatatccaaaaaataagcttgttgctttcacaccgggcctacacatacaagtggtgcctattatttgacccaaaatgcttcagcaaaacagacaccataagtttgattgtagcgtggccctacacacttacaagtggtgcctaaggaaccgtcgtatttactaaacatagcaatgcataggtgttatgtctacaaattataaattataaactcttaagaaacttagttattatttcatgaagagactttttaagtgaaaattgacttgttagaaaatacacacatgttttacgttatgtacatgccatcactaatctatggtttctggatcatttggtactttgtgctgatgcaatgaagcctggtgttgaactagattgagcgcttgtctacttgtcttctaactcatccttcaccaattccaatgcttgtttctttctgtggtccaaaaacagagagccagtggtttcaaataattcaaattgtaggggcccttgtggctaatggaaccgactgttggaacctatttggctgttcaaaaactttttcatgtccacctttctgctgtagctgctgattttatatattcaaaaccaacctgggaagtggaaggctgaaaaagatgcatgataggagtgttttgtatttttaaattgatttccctaggaaataatatcaaacacattttttacttattagtgcggatttgaatcacagatagtattttctttttaaataaaagttatatttgaataaagaatattgattagtaatataatgtgatatgattggtatataattttatcttttatatatgattataggtttataaacatatattaaatgagatcaattccttaaataaattttaatatcttaaaggattaattcttaacttttgtagaggataccgaattaaaaaaaatatatttgatttcacttttttagatatccattacttcataacacacatagctagtgtttgctgtgaagaggaaatggattaataagacatctataattggttggactacttacaaatgtccaatgtccagtcctacaaatagatgcaagttgaacataaacaacatgcccggactcattttaagattttcaattctatatttgaagttgtcatttaaattagaagagacaaaatatgttacttgctcgatgtaggtggcagattataatggttggataaaaaaatattatttttagttttaaaagtgaagcacaaatttgattttctcaagttttttttttataaaaaaactaagcttagatccggtcatcattaggttaagctaaaagaatctatatacaattcatattcaaaactcaagtcttatattttattagacgagtttgaaccaccctactaatccttcttattttactcctctaatttaagccttgctatttttaatttttttttcatcatgttaagtttttatattaagagatattatcttgtctctactacaataagttctttccagttttgtcactaaaatgcaagtggacactattgtatcgtgcacgatacgatttcacaaggtattttttttcttcttaaacgaacttaaaaaaattgtaacaaacaaaatagaaaataattttaaaaaaacnnnnnnnnnnnnnnnnnnnnnnnnnnnnnnnnnnnnnnnnnnnnnnnnnnnnnnnnnnnnnnnnnnnnnnnnnnnnnnnnnnnnnnnnnnnnnnnnnnnnnnnnnnnnnnnnnnnnnnnnnnnnnnnnnnnnnnnnnnnnnnnnnnnnnnnnnnnnnnnnnnnnnnnnnnnnnnnnnnnnnnnnnnnnnnnnnnnnnnnnnnnnnnnnnnnnnnnnnnnnnnnnnnnnnnnnnnnnnnnnnnnnnnnnnnnnnnnnnnnnnnnnnnnnnnnnnnnnnnnnnnnnnnnnnnnnnnnnnnnnnnnnnnnnnnnnnnnnnnnnnnnnnnnnnnnnnnnnnnnnnnnnnnnnnnnnnnnnnnnnnnnnnnnnnnnnnnnnnnnnnnnnnnnnnnnnnnnnnnnnnnnnnnnnnnnnnnnnnnnnnnnnnnnnnnnnnnnnnnnnnnnnnnnnnnnnnnnnnnnnnnnnnnnnnnnnnnnnnnnnnnnnnnnnnnnnnnnnnnnnnnnnnnnnnnnnnnnnnnnnnnnnnnnnnnnnnnnnnnnnnnnnnnnnnnnnnnnnnnnnnnnnnnnnnnnnnnnnnnnnnnnnnnnnnnnnnnnnnnnnnnnnnnnnnnnnnnnnnnnnnnnnnnnnnnnnnnnnnnnnnnnnnnnnnnnnnnnnnnnnnnnnnnnnnnnnnnnnnnnnnnnnnnnnnnnnnnnnnnnnnnnnnnnnnnnnnnnnnnnnnnnnnnnnnnnnnnnnnnnnnnnnnnnnnnnnnnnnnnnnnnnnnnnnnnnnnnnnnnnnnnnnnnnnnnnnnnnnnnnnnnnnnnnnnnnnnnnnnnnnnnnnnnnnnnnnnnnnnnnnnnnnnnnnnnnnnnnnnnnnnnnnnnnnnnnnnnnnnnnnnnnnnnnnnnnnnnnnnnnnnnnnnnnnnnnnnnnnnnnnnnnnnnnnnnnnnnnnnnnnnnnnnnnnnnnnnnnnnnnnnnnnnnnnnnnnnnnnnnnnnnnnnnnnnnnnnnnnnnnnnnnnnnnnnnnnnnnnnnnnnnnnnnnnnnnnnnnnnnnnnnnnnnnnnnnnnnnnnnnnnnnnnnnnnnnnnnnnnnnnnnnnnnnnnnnnnnnnnnnnnnnnnnnnnnnnnnnnnnnnnnnnnnnnnnnnnnnnnnnnnnnnnnnnnnnnnnnnnnnnnnnnnnnnnnnnnnnnnnnnnnnnnnnnnnnnnnnnnnnnnnnnnnnnnnnnnnnnnnnnnnnnnnnnnnnnnnnnnnnnnnnnnnnnnnnnnnnnnnnnnnnnnnnnnnnnnnnnnnnnnnnnnnnnnnnnnnnnnnnnnnnnnnnnnnnnnnnnnnnnnnnnnnnnnnnnnnnnnnnnnnnnnnnnnnnnnnnnnnnnnnnnnnnnnnnnnnnnnnnnnnnnnnnnnnnnnnnnnnnnnnnnnnnnnnnnnnnnnnnnnnnnnnnncaattattaattattttgttgagcataactgaagctactaaaaaaaaattatgtacctaatagtaaaaaaaattaattaataaaaataactaaaaaataactaaaataacttgacgatatgaccttaattaaatatttatttcctaaactttcattatatatgtgcattcaggaaaaaaaattcattatatgtgagtttatgttataaatttgattataatttttttgaaataagattaaaaaacttatttagatatgttttagcaaagaattataaaaataaactaaaaaacgtttgacaaatcataatccatttctgtttaagtttaaataaattgcatggatgtttttctaaaagcttccgtaatagtgaatacagaggttctataatatttgggcttatttagttatttattagactgaccattttttatttattagttaaaagaggtgtttaggaaattttttaggtttatgattatttgataaatttgcggattttgttttatttttattttttttaccattttctttattctgatttgtggttatttcataatgaacgagtttgcgttttaatagttcaaattttttcccatcatgtgccttgagttgaaagacttttcgaggccacatgattacgtgagggtagcatctgacttaggtgattgtaaagtgtggggaaaacaacattggagagattaccaaaatgaactaatgaaattggagagatcatatgaggagataaattaacgtacatcatcaaatccgcgtcctcgcatgatttgctgactcacaattaatctctaaagcgtcatcactatttttgtgcataccttaatcaaaatcataaatgaaaatgttttgttaatagaatctagcttaattgattaaatagaatatataaattattataaatttattgacatttctgttttgatttttacatataaaaaataataaaaacatcctccacactaatcagaagcacttggcggcaacccaatcttgtgctcgtatacattttccctctagagtgaactaactatggttattgaatgggaaatcagcagctaaagtatacagattttgaatatgtggcacaaatatgaaaaaggtaaacgtatgtagccaaaagttaaaaaagaaatgtgtcacattaagaaataaagtttcgacatcaaagatatatcgattgcatccattgcaaataagataaggggtgaaatggcagtctgacaagtgacaatactaaatatctttaaagatatttaaagtaacttacaaatgttgtttgtttttgtttttcctacctgtaccaaaaaatatatcttttaaagtaataaagtgaaatgaatggtctatatactgccaagggtgtgcaaaatatctctataaaccgaactaaatatttgaacataagccaagttgcactgtaagtggtgaaactgatagttcaataagtgtttgtcatactaaatgtggtttttgttgactattaaacaatttagtcaattaaatgcatatagctggtgcagccgaataatctaatcacgtagtttgatgcatattacttaattgtggaatcaaataaagctcagttgtcgttgtttatgttgtgttttttcaactattctgcctcccttttgaaaaatgcctacctgtttgttctggaattggtagactatcttaatcggggaacagtcacaacttaaaagtttcattaataataattgaatagacccgtatagaagttgcatgttcattgggactgaaataccaattaatttgtcaagacttttttacatcccaatattcatcaacaaaagtacaatttacaacaccccacttgcaaaattacataacacgcttccactgggacaataatagctatggtattttgattatatggacttacgaaagaacaaatagaattaaagaatttgagtagcaaataccatatagcattatcagaaagctgtactcttccagcacggtaaaggttagagagagacttgacttagaatacacagaagagagttagatagaactttttaagtggcctccactgataagatctccagttcagcccaccagagtggagagagtcttgggacagcttgctcgggtgatatatgaagcacttccctcaatctgggagttatgtccttcattgtaggtcttaaccttggatcagattgaagacaatctttgatcacctcacagatgacatcaagttcttcatctttgaaggactgcagcgtgggatcgatcagatagccgatgcttcgcttatcattcaagtgctcagcagcctaggaagttgatcaggatttttttgttaagtgacatagaacaatggagttgcacttgaaagtacaaggaagggtactttcaaaggaaagaaaaacaaagtaacgggcacaaatttcaaacttacccagttggaaaggtgaccttgttcttcagagtaaggtagtttcccagaaatgatttcaagcaacaatactccaaagttatagacatcagtttcaggatcagcctggggtggcaactcagaagatttctgtgattcatctccagttgtgttggtttttgcatgcttgccgaaagagatctctgatatctgagagcaatagaatggagatatgttacttgttacctaacacacattaaaaacaaaaaatagaaaggtgtataccttagcagcatagtcatctgttaataatatagcaattgaattgaggttggaatgagctactggtggatttagatcatggtgcatatactgaagacaataagccacgcccataataaccctcatccttgcgctccagtcaagaggttcaacttccttaactgaaaagagagcaaatatacacaaattcagcacgttgttttttacgaagagaacttaaccctttaatcggatttgctatgcacaaggtaataacttgagcctttagatagagatggaagttgttaccatgcagatgctcgaataagtttccattcggagcatactcaaacaccatcatccttgtgaatggttcttcttcgtcacagtacccaataagattggtaaaattcttatggttaacacgggacaatgcagcaatctgaagcatacaaggaacacaattagcaacaggtaattaagaatcgacagtccctctcaattgaattgggacttctaattcaactttttcctttccattgacttgaaaaggagaaaacctttttgcgataggctgtctccatgttctttgaccaatcatgggcagaagtaacaatagttgaatcaacagcaatctcgactccactggatagtgttcctttgtatatggtgcactcatcaaaactattaataatattgctgaaatcttcacaggctgtttccagctctccctgattcaacttggggacccctacattacatacaaggacaaaacaccgcaggaattttggattgagctaataacttaaggaagagagctcagacaaaattgtttcataggttgacactttagatagtatatatattgcctaacaagaagagaatccattttcttgcaattagctgaccataaaataatgaaatacgttcataaaattgttgttattcaaattagaaagatgatgcttgaacaagttgaacaggagactctccaaaccttaaaaaaaggtaatggacttattgtaacttacataaacaaatgaaaataatcaatcaaattactatagactaaagaacatatatgagggaagtcagtatgaggcgtttaaaatttggtaaacaaacattatttatgttaaagagtcattttcaatatcaataatttattcatttactgaaataatacctgttataaatgctttctgcaactgtccacttattcctgtcttccaaggctttattacttttgctgctcgtttacgccaaatgcaaagcatgatcacaaaaacaatgaccaagacagcaacacctgcgattataataatatacttccatgattttccagatgcaccattaggtgaattttgttgacttgcttgattcacaggtggagaattagaagatgaaggcaatggtgcaggtgactgattttgtttcttattgctgtctggcacagctgggaaagctccactgctctgggtaattggaatagaactgatctccatagtaggcccaccactgaaaggtgcagcagcaaggttactggactgatcaagcaacttacgtcgtgctgaattgattagatttggtacattctggccaaactctgactcatcagagcctacatgatggaaggtgtgttttgaaagtcagttaagagcataagtatcaatttctcacaggccataaaccaatcaaggttctccacttactagtcagattgtcacagtatttctcttcataggcatggggagtagcctttcctagcttgaaccttcaaataagagcagactatgttagtaagctaaacatgatgaaagaagaaaatatatgtacatattaagattgatatggggaagaaagttatctacacacagtggcagtgccacagcaatgacagctttgaggtaatttttgagtgttcctttaagtggaataacaaatgaatcttccatgttccattgcttgaaatttttatggcatatatttttttcaccatgttgttcttgttgttgtatacttttcacacgatgcatcgaaaggtcaaaaaatcagaaactcaaccattcttgttaaccataaaggatgcagcatattaagataagtatacaatctcaagaggatggtactactaaaagtttgctactgctaaatctaatcttaccaccttagcacagctataagacaacacaaaaatttcagttcctcatataacaacaaaaaaataactatggtgatcagataaaagaaaatcaaatggaaaaacaaacactgaacaaacgaaattctgcgagtctcttttgagtttatatggttgaagtacaccacaaactttcaatgaacataatgaaatgatcaacagtttggattttcaccagtcattgggctatcaaatgacaaatgatgaacagattgcttttaataattgttatttaggtaacttttaatcttcgcagcacatatgcaattagacaagagccaatcatagataaatagagtgtgagttctactgctataaatgtgtaaccaaagacaaactgggttttaaggagttaaaacaattaactaaaaactgaaaacagaaacaaatttcaatttatctttacctccatagacctccagttaagaaagaataaacattgcattggtgttgatgcagaaaaggttaaacagatcaacaagtgccatcagaaattcagaatgaagatttgtatctatttaagacaatatacagaaaccccatgtaaacagaaaattaagtatttcatttatgacaatatgagatctcagattgattaatagaacatcttaaaccaattaaataatgacatcattatgtataggcacatgaagagtgcagttgactacatggaatatatttgacttgatgcctgaccttgtggaaataattttccagtgattgtccaaaagacttcattgtttgcaaaaagaataaaatttgtgacaacagtagttcttatgactaattaacttgccactacataagtaaaggtaaaggaaggaaagcataaggtcactaggtcaggaaaaaaatgaagatacacttacaggtgtgcaaactttctattcttgccacgagataaagttgccaaaggagttaaatgattgttattagagggaaatctgagctcttgagaatcactgccttcaaatttattgtcacaaaccaacctaggaaaaaattaaatttgattgtaggtaacccagaaatataactaaatatatgaagaagaaaaaaaaaagaaaaagagttaacttacaaatgttttgacaacaacaccctgacaatttctgctgggatacatccagtcaagtcattcccccttaaatccaataactccagcttgtctagacctccaagttctttgggaatggtaccagaaaaactgttcttgtatagtacactatttcaaagtaacaaagggagcaaatctgaattagagatgtatttgaatataaattactatatgaagtcaactgaactattggattttaaaacttcctagcccatatttagtctttcattaaagacatatattaacaaaccgtataacattgagttatagtataacaagaactaaaataaccaaacagaagggctcatgataatctgtccaacagagacaaggaaccctcatggacactaacatgatataataatccagctgagagcaaactaactgtaattctttggagttgagtacttgagaatatagctacttttagagtttttgatggggagagaactgctatattgcaggaaggcaggcttacaaattaacattgcatagacgggagaagaaaagaaaagaaatgttgaaaaggtaaagaaagaattataaaaatcataacacacaaacaaaggcatcattttttttgtttggttacacagacattatttactgctattggtctcctgagttcatggctacattccagacagaagggaatgcggcatagtgtgattaaggaatgtgaaactgatacaactgtaacaaggtacatgttagtatgagcagttcatttttcaagcatatcatgattatttactaaatttaagaatgacatctatgtgacaaatgctgagctcttagatttaagttacattattataagatcaagtttaatcagagctttcaccagcataacatgtgttttacttttgacataatggtaaaaaaaggggggaggataggcggacacatgaatcaagaacccttacagggattttagatgacgaagtttcccaagctcaggagccaatgtcccttccaaagatagatcaggtaggaccctacaagaaggcacaaaattctataagcacataaaatttagaactgcattcacatcaaccaaaatggaagctttctttaagcatcaaggacaactatatgtattactgtttggtaaaaaaaaatactatctcgataaaaaatttaaaaagaggaaatcaaagggagttacttacagcgtttgcacttgactatcaacacaacgtacacccagccatttgcaagggttgcaatcgtttggattccaatttgccagagcagcaaaaggatcagaagttattcttccccgaaattccaacaaggttaatcctgctatgtccattccaaatgcaacagcaaaaatcaaacatcaagatacaataaatgcattacatgattcactgtaaattagggagactaaaaggacaatccatgcaaatcaccttcatcgttcagagaccaacactgtcgagttccccacagagaaatcaatccaacataaattcggagccataatccaaatggcccccatatgctttccattggcatgagaaggcaatgtcactttggtagcgacaatatctatatctctttaaagtcaggaagctatatgatatgtcatatcaaatttacaaaattggaaggttttctctgtacatagaaacccttccacctatttggatgaagcagcagaaaatttactaactatgcaaaacttacactttacaatggaaagcaaaaacaattgaagctcttggtttcagggtccctcattttgtgtatcaatctcttccttacaaccttttgctcaacaaaagcatacccagctcaattcgtcctctcaatgatgattccaaacaatgtgggctggggctgtaagaaattacattacatccagagaaaaaaaaaataaacaaatgtttttattccaacaaataaaaaaaataaaaatgaaaatgataaagttgacagcaaatcaaaaccataacaaaagaagaaacaaggaataaccgcatgagcaagcaaactttcttggtcccatcaatgttaaaacaaaaaacaaaagggggtaaaaagggaattgaattaccatgcgaatgggagaaaagggtgcaggaaaagaagccctttttgcgttgaaactgaaggatcaacaatgtttgatttgatgatgcgatgcaatgcaatgagttggtggtgacaggttgggtggggggtggattaaactgagacaaggaaggagtgagaagaagaaaaaaaaggcagcaaattaaaagattgaaatgaatataatgttgttacgttaaattgctgcctttgtgaagaggaggatctcagagaaacctttctccgaccaccttcataatcttacaatgttggggttcttttgtctctcttgtctcttgtctcagtttctctctcatcaccccccaccacccacacacacaattcccccttctcatattttttttttcttcctaaaattcgttgtaggccccattggccaccacttccgaattactcgcacgcgcttttttttttgttactgctcgctcactattattatttcatttgtgtacaaaaatggattgggatagtgtaattaataaagttcttacattttcatttaattaaaggtgcatgtaaaatgttactaatatttttacgatatcatcataattaatttggaatggaattctttcaaaacaaaaaaataacttggaatggaatctcttgttaattcccccatttaatagtaataatatgactaatgtagtctattattagataatagattctactatggagcaaatcagtacccattctgacccaaagactatttcaaattaaaatggctaaggaattgcttgtcacgatctaaagtaaagacaaatcaacaaaaatatactaatatacggcatgacaattaaatgcactcgtagtttagtgtctgactatgtaaaattgaccacctaaccaggaagatacatatttcaactttacttgtattgttcaacttaatcatcaattccttctccatatttcaaatcataaatgtcgttgctattggttgcattttgatcatgctattcctgttgaggcttgtctctaaactttaaacaaaatttatatttaaaatttaattaatattttttttcttatctattgtaaaattatttcttacaatcttcttattaattatttttaatatctcaaataagatttgcaaaattttaattttaaatcattaatttcaacaatgacaatggttgcaagcattatcaataatattttagaaataattcatgtatttgaagaatatatttgtttggtatactttcatagttttaatgggatgtgaaatacctttaattttcttttatttaattttcatatgatatctcatttttaaaataaatcaagatcttagtatgatgatactcagtataatttaaaatcttttcaagattaataaaatatcatttcaactcattcatttccaaagttttcatacttttagaattcatataaaaaataaaacgtatattatgaaaattattcaaattgacttttaataaataaaaaataatctgatacgaaaaagaaactttagttaaatgtgtaactaacattttctcccaaatctgttttttcatcaatcatacatctattcataaaatttaaattctataataattttaatatatatagtgttttctcaaaaaggaaaaggaaagtggagtttaaaatagatgtaaaacgattttcttaacttgtttctactttctaatatataaaaaacacacaactcttttacttcaataaagtagagtttaaaagagatataaaactattttcttaacttgtttttaataaaaacaactctccttttacttttattttaagttgaatttcaagacaaaattgtagaaaagttggtttaacgataggctcaactgaaaactaaaacaagatacttcttcagttttactttgtgaacatacttttgggccatctgaaaaaaaaaaaaatgcaccttgtatttaccacgccatgctcttgagatgaatagtgaactgaacagcaaaacagagacggttttgcgaatctatagcgtgaattacagaaacacggtaaggaataaggatcctgtcaatgcaattgagcacggtttaggtccttttttccaaaaactaccaaaagctgtctttatgaagctctataggaatgacgaatatactttgccctgaaattgtcattcccaaaagatgaaaattcttttaatagcattgacgacctaaccatttgattgaaagaactgtgtaagattaaagtgaagagtccgatctgaagttactgcctccatggaatcatgcacagaggggattttattcactgttggtgatgttagtttgttgccgtgaaacgaggaagaagcttctacagtttttctgtattctgtttcttttatgtgtttctattctgttatgattagttttttggtgctgtcaaatgattcgttgtaatccttttatgtagtaatgtagtatgtataatgcgaaaggaaaagtcatactattcagttttcaaaaggaataaccttaaacgtgtatcctatttgcattggcgtggggtggggtggttacaaaaatatgagaaagtgatataaagaaataaaaaaaatgttaatacacatttttaatgtatttctattatttattttttagagattctatttattgttaaatgtatttaactcacaattctattatttttaaaaagttttaattaataataaagaatatttcaaaaaaatatatattgatcttttttttacaataacaaccatgaaattcaaacttcaaatttcatgctaactttcaaatcctctaccactatgtcaaccttagtggttaaaaagaacattaattgtcaagaaaaatgcatatacaattataattatccttttccaaaagattttccccttaggtagtcctgttttgagttcaagaattgatcaagagtgtgcttttcttttctttttttttttttttcgagcaaaggagaaacccgaaacaaaaactacactattacagggtaaggtcaccaccccagagcaaagaaatgcaaggatacggaggttgaaggctccaatgagctcccaactccctgttatgagtctctccagctagccaatccgctnggtaaggtcaccaccccagagcaaagaaatgcaaggatacggaggttgaaggctccaatgagctcccaactccctgttatgagtctctccagctagccaatccgctccatattaacttctctaaactggtgggaaaaatacacctgcctaaggagtgcgcgatttaaaaatcactcagataacttataaacttatacagtatttgactagaaccaaaagcttatttagtaagctttattttagtagtaagttgctagcttatttttatgttttttttttcatgttaaattgattcattttaagataaagtaatatttttaattataatttcatgatcaagttaggaatcgaaattcattccttgttattttcataagttacttaaacaaacttttagctcaaactgctaacttttttttatcctcactaatttactttaattttgtctttatttttattttttttaaatttggaaactctttcctaccttgtcactctcaattatgtcatacatttgattttcacatcttttattctcacactcacaaagccacaacatgcatcttaaacaatatgtatccttaactcatcaatataaataatcaaatcttcattttttttataatgtgatattttaaaattattttcctcatatatatatatatatataatcaaataacaaaatatattatgttatgtcattttatattcatcaattaatttcatcaaataaatatttttaattaaataagctaatttgtaacttttccttccaactcctagtagtaatttataaacattcaactaacttataaatttcaaagtatatattaactgattttactaaacacaacctaaataaattatcggggacagtgcaataactcaaattcaatttgcctttagctggcttagtattatctaactctagtctgttagttaccatcacttctcatcaatggtggtaccaatggcgagattaattagcgcgcagcatcattgccattgatgatctctatagttttcttttatatatggtatttattagtagatgtggcataaagtgatttgattacactatacaaacgtggaggtggtgcagaaataaaataaaaatatatcaattgaatatataaaataaaaataattcctttaattttgttttgaagaattctcctaaaggttgtaccgccctcgaattcaagtactaaccttgtccatcaatgacgaaataaattattggggacactgcaatacccaccgctcaaattcaaattgcctttagctggcttagttttatctaaccctagctagtcagtaagtcaccatcacttctcatcaatggctaccaaaatggcaaggttagcaacatcatagccattcatgatctctgtattttatttttctttaaagtgtggtatttattagtggacatcgcataaagtgacttgagtgcatcatacaaacgtggagttggtgcaaaaacaaataatatttgaactgaaaataaatccttaaatttcattttcgtcaagtatgttgatatttgattttgctgcattttgtttgatagagataattgttaaggatgtatttaatttgataaaataaattatatactaggcgatgtaattataattatttatgtttgatttttataaataaaaaaacataggtaacacaacttaaatatagataaataacaataaaaacttatttttatttatttaataaatcatgagacaacttttatctcagaaagacaaaaagtaccaacatgttaaataatattttttatgaatacactacatttcttcgtaattgtcaccgttatgcatttctattgagctagctgaaaatgtgagatcctaattactaattagttagtagccgacatttaaccaatttaacttgttctcgggccaaacaattagtacaaccttagactgaattttttttaatatcattaccttagactatgtattatatatcagagtctccacgtattacataccctgaccataagtgccatattactatcttacttcgagaagatagttagactttgatactaaatgttataaataaaaaaggaggaaaaaatttcttaatacatttcttgtttcctttgaaataaactctcatacataagattgcctcttttacgtacaaccaaaatggacatgttaagatattacaaactaagaagaaatttatacttcttaatttaggtaaaagtccttattatcatacatcctaaattggaatgaattaggattaaaagaatagagaaatgaaaagaaaaaagagagaaaataatatatgtgataaataataggatgaaaaaatgagacacaacaaaaatgagttaaaaataagatacaagagaaattgatcagtgaattattataaattttcttttggtaaatgctcaaataccagtagcgtttatataaaacttcgtttgttaagcaaaataaatttgaattgtcgtacaatgtttttcaaatcataaaaacaaagtgagtatttggttaagcgttgagtgaaacgtgttcgtaaacactgctaaagtctttaaattcttagcatgcattgtaggaaatcaaacactcacattctgcaattaattaagctgactggaaagagcatataactgacattaattaatttttagtaccacccagagctcttcaataactctccttcttcttctgtcagtttgctgctagttatttaaaggccagagccagatacagatgcatgtttttaactatattaagctggccagacaataacctacgtatatgatagaataataaatagtattactgtattagactattaggtggtaccatctaaagaaattatggacatatatatactgctttgtatatatagaaattaacgttgcatatatatatatatatatatatatatttattggtaaataatatattaataccctttgcctttgggagttagcctctttgacacgtatgcattgtcactgcacatattttttgtttgttgagtatgtttcatattgtacctttaatatatataaatgggctaagtttatataatttcttgtaatctgaatataattatacgacttcatgagagagtataatgaaaagttggatttaactcacattgaatgaaccaggaatatatattatttttgtttttccttttctcttttctcaattattatgtgattgttcggtactcaatattgtgtttggactttggaaactcttgtgggacaactctatcggctttcttgaatcatggttatctgtcaaacggtaattacaattagttgatatagaagtgaatgaagctgaagatataaggttggtttaagaatgaatgaaatcttcaaaaatcaagcggtttctaattgttaagacatacctagtggttcttatgctttttgatcagtaggaaaatgggaccactgagctggtacatatttgtctttttcacaacgatttcctactaagcagtaagcaccccattaccaatatgttctgttaatatgggaccgctactgtttacttatttcacattttcattattatccttactctgtctgttcctactaaacacccccattacaataattttgtcaacattggaccactgatcggattattaagagtgggaacgagtgagacatgtgtaaatttattattcatatacaattacaatgcataagaggtgtaattggataggtcatttataccacatgtgtaatgtatcttctttttttatttatttattattgcagtggtgaaatttatcttaaagtttcttcatacctaaaaatttatttattttgtgataagatatatttaaatatagactacaaccttgttctaattagattaatagacaccagctgacaaaaaaaaaagttcagaattgttgtcaaataacgggctcttttaagggacttttttttactggaaaaattaagggagttaaacctttagaaaaactaatttatatatatatatatatataataagtatgaaatatttattgattttgttaataattaatttctattaaaaatatgaataatcagttttagtaggatcctctatcctaattatatttttctatccaattcacttaatttaagtaattcaaacttaattttacttgaactaacataataatattggtactacttaaatagcggtaattaatgacatacacctactcagagaggtcaagcctaattaactgtttagtaatttaaaatttgaccttttaattcaatagaatttttctgcaccaaaaataatatatcgaatttttaaaataacttaatttaattagtaataaattttacgaaatggtgaaactttccatattaattatgctttacttaaaatttaaattacatgagagtttccataagaaagatattactagcaagtttcgttattaattattattttaaaaatttacttatataacttgtaagttcctatcaggaaattaaactaaattattccgtgttctattataaaataatacaatattcaaattattaaaatatttaatgataggtacaaaaattaatgtttctggaacatttagtattgatttatataaaaataaataaatataaaaattaaaagtaataaattcatgaatattttttatatttcaagtaaaactataagaaaatattnnnnnnnnnnnnnnnnnnnnnnnnnnnnnnnnnnnnnnnnnnnnnnnnnnnnnnnnnnnnnnnnnnnnnnnnnnnnnnnnnnnnnnnnnnnnnttttaaatatttaatgttaaaaatataaattgataacaggtataaaaatataaattaaatataaagaattaataatcaacaaaactagtaaaaaactgaaaataagaagaagaaaaattgtaaggtctaaaaaatagcataataattcatttatattatttcattttgatttaaaaaatatttttatttcatttcatttaataagtatattttaaattgataaaaaaatgtaaaaaaaaaactattatcctaatttctaatatgagaagttatttaaagtaaattaaaatgttaaaagtgatcattattttaaaacatatatagttataaaatgacaattaattaaatatatttttatattttttaaccctgaccagctagttcaactaatttaatttggccaaattataacatgttaatttaatcaattagtttatttacttttaatttccatatttaaatttttagctacctatttcaattagctcatcgacaaagtaggtatagcaaaaacacccaaattaaagtctcaagtaggataacaatttgtccctgaatatgaggatcttggtgggaattgccaggaccccaaggttggagattttttttttccacccttgttgggatggagtaaaataccacctaggcaaatttaaaaatggggatgagaatcacactccctgtctcgcgggttcatttatatccaagaaagtactgaaataaataaccttatttaatatttacatttcaaacatttttttcttaagttgattttaccggtaaaaccgttcgatattggtttttgagagaatactggatcaactaaatgtaattttattttattttcctttattctatctcttcttcaacttcttcttacttattactccatctaatcttaaatataagatagaaaaaaatacattatactaattaagaaagttaattaattacatttaattacatcaattttaataaaaatatttttttcaacttatcatttattagaactttgtatcaagaataaaaaaagtcattaaaactaacatctcaattaaatgaaggatattttagaaataataacattaaataagataataagataaagttagttaaaaaaatatatatttaaaaggaaaaaaatattcttatatttaagagcataagtaacattgtaacattttatgagtacttggattaatactataaataatttgttatactgttgcagtaaatgacgggaaatttaaatcgtctactagtaatatctttcgtttcgtgttttgaacacaattccaattaatttcttctttaaccactgtttcgtaacagttcacgccacgcataaatttcttatttaagtcaaattgtttgttctttaatatgttatggagcaatcaaaactcgtttaattaatcatacactagtttcttcctctatcaagaaagataaacagctacattgggcaatgttaattaattattctttgaaaaatttagtcaaggagttggtcgaacacacgtcatcactaaaaaagtttaaattcatgcatgatattcaattattgttgccagcactctctctttaattggtgaatgtaagcgtatccatgtaaattcttaatatagatttatgcctctcagggagttgtgtcgatcttattctaataatgttttaaaaaccattaaactaataccaatatgataccatatataagctaggttatggtcttttttttggtgaaaaacttagttatggtctaattgctgatgataaaaaagttatggtctaatttgttcgatctcatttttaaaacactagtcttttttcagctaattttcgtatcatggcacggactccagtggttaagtatgggaatttgtgtagggtacacaattttttttttactattgaattaatctttgataaattggacttcccatagtgtatcattcctccttcaggtctctttcatgtaccccaatgctatcttgcacgttgtcatcagaagcgatttttgacggttcctccattgtgaccacagccagtcaccacccgccaccgtcatttccctccaatcacaacgactattgccacaagcaccaccatcacccaccaagcctcctccattcattctcccttttttcaccaaaccccttatgcatttcaacgaataagaaatttgaacaatatatcaagaaattcaaatctggattatcgcacaacatagtaaaaacccatatttgaaacacaagctcaacatagaaaaaatccaaatcatgaattcgaatatgacgaaaaatgacatacaacataacaaaaacccagatttgaattaacatacaacataaaaaatgctccaaacatttggatcttaatcaaactttttaataattgaaatgctctaggcgagtgcgacggtgacgacctcggtgatatgcgtggtgttgtcgactttgctcgcaaacctcagagtgccacacacaggtgtgatcttgttgaagtgaatcagggaggagttgaatcgcaaaacggggagggaacaagcacactggatctctgtgcggtagagcttgcggaggggaagcgaaaaaggcagcagaatcaacttaggcttttgtacacaatgacttaatgcaaaaccctcaaattggtgtcgttcgtgtgcttcggattgatgaacacgatctccactttcccaaatgatggaattgaggaaggcattagtgcagtgtgggaagagtgatgacataaactcgaagttcagagaagaagagtgatggtcggaagggtttgtatgaagggtgatggaattggggaaatgttgttgcagtaggcattaatgagggcgaagggaggtggtgagtggagagggacagcggcggagggatcagaaggaggggagatcgagaagaatatggaagaggacgagggaatgagaaagagatgagatggtatatttgtgcgggaaatgcaccataataatttgagtaagattaatttaagggttaaaaaaaattgtacatcatatacaacttctcgtacttgaccattgtaacataacatgtgccttgtatcataaaaaattaagaataattatctttcaaaattttacttcaatgttattcgaaaaaaaaaaaactgttttaaataatttataagataaaatatgttttaactttttagtccctcaattttcaatcaaagtaatctttgttcctacttcccatactttaaaaataacgattgtgattttcgtaattttttataattggtggatttcacttgtctttatgaaacttaggatacttggttgaaggatataaaactcacaagttatataaaaaaaaacattgtttttaaagtaatttttttagtaatcagtataattagcatctctaattacgatcctaagatttttctatataggaaagaaaataggatgggtccaaaaatgttttgcctctacataggtgttacaaattcaagctatacaaaattaggagttgtaattaagtgagaaaaataacataacagatnnnnnnnnnnnnnnnnnnnnnnnnnnnnnnnnnnnnnnnnnnnnnnnnnnnnnnnnnnnnnnnnnnnnnnnnnnnnnnnnnnnnnnnnnnnnnnnnnnnnnnnnnnnnnnnnnnnnnnnnnnnnnnnnnnnnnnnnnnnnnnnnnnnnnnnnagctcaactttatttctaattggtattttgaaaataactggtttattctgaagactagtgattgttgtttataactttcccttttccaaaaattgatgatctagattttcaaaaacttgtttgttaatgcaaatcagaaagatggaaatagatatttgggtaaatggttacttttgatctaaaaatgtaaagtgataatnnnnnnnnnnnnnnnnnnnnnnnnnnnnnnnnnnnnnnnnnnnnnnnnnnnnnnnnnnnnnnnnnnnnnnnnnnnnnnnnnnnnnnnnnnnnnnnnnnnnnnnnnnnnnnnnnnnnnnnnnnnnnnnnnnnnnnnnnnnnnnnnnnnnnnnnnnnnnnnnnnnnnnnnnnnnnnnnnnnnnnnnnnnnnnnnnnnnnnnnnnnnnnnnnnnnnnnnnnnnnnnnnnnnnnnnnnnnnnnnnnnnnnnnnnnnnnnnnnnnnnnnnnnnnnnnnnnnnnnnnnnnnnnnnnnnnnnnnnnnnnnnnnnnnnnnnnnnnnnnnnnnnnnnnnnnnnnnnnnnnnnnnnnggagttgtaattaagtgagaaaaataacataacagatttgaattgtgctttttaaaattttatttctatctacaaacctttttgagtccactctggtgctcagaatgctctaatgtcttagcttnnnnnnnnnnnnnnnnnnnnnnnnnnnnnnnnnnnnnnnnnnnnnnnnnnnnnnnnnnnnnnnnnnnnnnnnnnnnnnnnnnnnnnnnnnnnnnnnnnnnnnnnnnnnnnnnnnnnnnnnnnnnnnnnnnnnnnnnnnnnnnnnnnnnnnnnnnnnnnnnnnnnnnnnnnnnnnnnnnnnnnnnnnnnnnnnnnnnnnnnnnnnnnnnnnnnnnnnnnnnnnnnnnnnnnnnnnnnnnnnnnnnnnnnnnnnnnnnnnnnnnnnnnnggttacttttgatctaaaaatgtaaagtgataattaataaattagtctataaaagaataaaattaagttctgatttagttctttgaatatataaaaattgtaacacttatattttatcatataatttaatattaaattagtctttgaactttacaatttaatgacaaataaatttttaacaattacaacttaatatccaatagttattaaatattatgacttaataactaaatggtcccataaaacttaatgatagaacataattatcatactttttatacatttatgaattaaattaatttttttctttcagaaattaaattattatcaccttacactttttagaatgaaattgaccatttatcataaatattttatcctagttcgcccataatttggacagnattataaaagtaaaaaaaaatttatatataataatttataattaaataattgtgtaaaaaaacctttagattgttaatatgtatattacttataaatgcaaaatagagaagtaattaagcctctctatttataaatgcctatataattcatgcgttttcagaaataacaatatataattaacaatttattcatgcaaaatatatagagaggctaattaagcgaatgaattccaaagattaaaaaaaatgagatgcacatgcttgaacatcagtaaactcttcaccattttattttataagatgtttttgtgatatatgatttaaaaataataaattccaccacaataatattaataatctttaggcatattctttatatggaccttgtgcaccttaaatccaactattttttagtaaaaaataatatgcacattttctttagaaaataggcgaattttggggtggagaagttatcaagtgatccatgggtgaaacactaatattggcccttagatttattattaaaatactgcaatggtttagattaaaaataaatattcttttaataaataaaaagaaaaaagaaaatgataattttatttttatcttctttatgtcatcccaaccccaacatcggggaagctcccaccgaaaattggcaagtgttatttgataattttttttgcttatgataccatgtgggtcctgtagatcgttaattttattcaccctctccatcagtcttcttttcttgacacagcctttgaaaagctatcaaggagaaaattctatttcaattaaatgcttgagatccaatgacgagtcattgcaccccattctgtttttgtaacaatttcatcataatcaaacctgcaaccaagagtttctgaaagccccaacttgaagtgcctcaatcagaatcccttcctcccttggttaatgaacgtttgcacgagctatacgaacgaacatggaggggtcgtgatctcaaagtggaggacgtgagtcacgtacgttaaagcatacctcacttttattgatggcttcctttaaataatgattatatatttagataaaaaagagatgagactgagtactttacgtaaatatataatagattacgttgataaaaattcgtgtatattaatttcttcctattttttcctttgacatgtgcttgaaataccgagggacgccatagttgtagttacttgcctgcagctcctacttacaattatagcaactctatagttggatctattgaaacacatacgcttttaaggagaaaaaaactggccaatgtaaattaatgtaacattaatggagttcttttttatatttttctgaaatatataatttcgcctaatatttaataataataaaaaaatatataatatctaaaaaatatctggtactttcttcatttatttattaatttcaaatattattaatcagaaagactaatctaattaatcatttgatttagaattaatacaaaggattgtctaacaagtttttttatggatactggctaaaaattaaaaattaaaaaataaataaaattattgaaggaattgatattttttaattaactttttaattagtgccatataactacacttgttaattaaaaaaaaaacttttattcaaaatacgtatagttactgtgtgtaatgtgctttaaccaatcttatggtttccaaattgatcagcagttgatcatttgtaaactataaatttagcactataataatgatattgcttaggccgtacatttatccctcgttcaatgatggattctcaatttcaattaaatactaacagcaacatgcaacatcctacgtgagtcccaagagtaaaaaattaaactaatccgtggtgataatgatttctcactcattatattcataataattattacgcaacagtacgcttgaaaatttttctttaaattttttgtcaagaccaacaaaaatatagataagtaaggtttaccaaatcacgaaaggacaagggcacaagaggggataatataccttggcacattattaattattgatataaaactcttttccggtgcttgttataagacatgattctcctttatgggtcaatcaagaaatgcttaatatcttgtaatattttatagttgtagatcgctgaggtatgtccgtataataatgtaatgctaggttggacgtcgtcatccatgaaataatataaaaatacgcctaattctttgaaaagattcttatgcagtttaattaatatatcttgaaatgtcaactctcatgcaaacgtgaggacaaaaccaactctattctcttaaatttcttaatctctattgatataggctctcctattttcccttcctctccacgtaatcttgtctctgccaaacccttttctttaattcttcgaatatctgtcatcactgtatgtttctctctctctatcacactctcactgtgatcgagcactgggcttgaaatgtacatatatatatatatatatatatatatatatatatatatgcacatgccacgcaaaacgagctttggagtttggcgccatctagcaaaacctaatttctcggctgattccaacgttgtcccaatctacaggtcctctttgtccttttgggacaaaaacaacccaaagtgggaaaatgaccaaaatttgtgcccttatgatcagcacatcttatgggagagacatgttttctttgtttggtttcggattttagaccctgccatccctcattttttttcatgtaccaaacttcagacctgcctccctcgattacttgtgcattgaatttggtgagtaattaatagtataatgtatttttcttagttttttttatctcactttattaccgaagattaatttttttgaaatgtagaggttattgaaatgactttaattgtaactctcattacaaaatatataacattttttatatatgataccaagaatcaaacatttatcgataatatgtttgaggacctcacttatctgtcaactatatgttaaactttgttgccttacaaaacgtaacaacatattttttaaaataatttttctattaattgaaatttattgaaaaatatatatgaagagtgtctcagttaaaatgatttttctattaatataacaacatactttctaatgaattttacttgtgatttctatacttttattaataaatctcagttaataataaagagtgtctcaagaaaataatgtatgtatgtataaaaaatggagcacgtgatatataataggagcaatcaatacaacattgaaacaattacttgatcgggtccaaatatactgacaaatagtatttgcactttttttaaaaaaataatatatatattctttttatttttaattataagattcttttaactaattcatgtgtcttaagaaaaatttttaatttagttaattacattaaacctatcaattatttgtattatcatttcaaaattattattttcttatatgtctatctaattaattatttctcatcaatgtttggagaaaaaataattaaataaaaatatgtaaaaaataataattaatacaactaaaaattagaaaaaaagatcttataaaaatggataaataatttttttaaaaatcttataattaattaaggacagtatatattataagtgtataataagataattaatatgacgaaaaagaaaagaaaaaatataatgttataaaaaaggttaacatagcatactctctttatttttgtgtgtatgcctcatgtgtgtatatatgtacgtattatatattattaattacttgtcagaggatagataaaccagaattcgcaatgtcactttttagtttttgagttgtacgtgatgacgggttgtgatcacctgaaagttagagcaattttcatcatttaacaaaaaacctggattaggaaaattggtgttaatagtaataatatctggggttgacaaagacatgactaagttaaaccgcatatatggttgcggtattcaacaaattaaaagagttgggtgcattagaagtcaataaagttgatataaatttcaacgtcccctcccagcttctagattcctttagaagaaagcccgattgtcaaatattttgctaacaaatcctctttttcctacagattctcttaacagaagtaaattactatattggttaaaaagtgagatcttaatggttaaaatactcggctattgctatgttcagttacagtattaatttattttgattataatataatgcttggactttggactttaatttggacttccttatttcaatattgagtaaattgagaaatacctatattgtcttttcctctccatttccatgaatggaagtcttcaaagttagagtcaagattccagtcatatagctcatgcatgcacttaattagaaaagtaaattacaattgtctattatgaaatcatgaaatgcatatttagccaccagttaccgttgaaaatgcctcaaaaactaaattatacatgtcgtttatttatatttttgcacatttcccaccaaaattgactatatatttttaaaaccacacacccctattatattacagccttatattaattaaggttgtccaatccctaatattctacaaagcataccaaaaataagacgtcactgttaaacatacagatcaaagaagtcagtggaaacatatggtatattattaaaagaagagatattttaaaaatatagtatatgagagaagcgactgagaaaatgcacacattattacgacagaaaaacagtggtattgaaatgggaacaaagtcttagtttaggtgggaagaaaatgaaaggttgattatagaatggggtccacaacatacatgcacctatattaagaatatggagctagcatggtcaattaaaacgaacagtattaatattattcatatatcacattttctaaactcatattttacaattttgtacacgtgaaaaaagagataaataaacattcccctcctttctattttttttttcactcataaaagtgaggtataaaataaaattacaaaaaataaagagcaaatatcataattaacatcaaagtgcatgagtccctagcacaggtcaaacaattaagataatcacgagctagctagttagagagtagagacagacagagaggtagattgatttttacaactgtcaagaggggacgaagagaaaaaagggttagaggagaaaagggtaggaattaagtacaaaagggaccagcaacatctgtatccattatgtaggtttattacaatttaaggagaacaagtagcctgtccgaatattgttgattctcaattttttttttctttctttctttcttttcctttcgtaccataaaagcctctctaatatcttaaacttatgactctaattcttctgctgaatgatatgccaaagacatcccaaaactaagaccatatatcctctctctctctctctctctctctctctctctctttccccttccaagcatatcaaagaacacagcatcatccaagactaaatccagcacaatctgtccatgagttatgttctttaaagttttataacaataaggccacgaaggttctccataggtgactaagtgaagagagatatggttggatatatatatgcagtgttgcatctatgatcaataggcttggaaaagaaagaaaagaggcacatcatcgtgaataggctcattggaagagaaagaatagaggaacacatcatcagcgtgaatggttggtactttagggaaaaaggtgaaacactcaaaatcaaagtattttttctttatttttttaattttgttgatttcttggacaaatcatcaacgataccagttcaaacaattcaccgttttcatgggttttgtccccgtctcctttttgtggtgtgtactttggatcatgaatactattcttttctctttgatttcttatgattacatataaaatgatttctcttcgatattacttcccgaaaacacttgaaatttattcatacacaacctattgaggattaatttcttaatcaattcctaagttttctcatccaaagaaaaattttaagcaccggatacgttcttctgaaccgcatttccctacccgagatgtgttatgttcatggtaatgaactgactttgttttttaatatatctttcataggtttgcggccggcaaagcaattaaccctttttcttcatcatacatctttttctaatatcaagagaaagaaccataattaaaattgagatacaagtgtgtaagcgcaccttgttcttgtcctgaaagcccattttacacaagatatcataaagcatttgtacagataaaatgacaagaaaattgattataaaatgttagttaacgctgaatgaaaattttctctctctctctctctctctctctctccatctctctcttccgctatatcctagttttcttgcttattcactacctacgatttacacatgaatatatatgcgtgtgagttcaagaacatgatcatgtgagtgtgtttattttgtaaatctcccgaaccctttacaagccttttgaaatttattatttcagtgattaaattgaaacaatatatttcttgttatatttccggagtaggaaatggcatgacctaaactaaagtaaagcgtttgttcatacaatttccatctttttagtagtaatgaatttcctcgtctaccacttgagttaattcctttccacttaaatacatagatctgagtacttaacacatccctcacaaattttattcacatcttctcggtagagaagttggttgcacttttatactataattcttcaatttgacctactactgctctttgtgccataacttctcactattcattgcttagtaattttctttggtacaatttcttgtaatctagctagtgactattactttaccattgaattttaaagcttcgtaattgttgtagagaaacgacagcctgttctcacaaattcttctttaaataactattcccttatattgtttattttgccaactttgatctgcacatttaaatttatattaatgtcgtgtttgtttcagacatgaaatgccatttataatttgtacacattgataaagaattgaagttggaggtgatcctgatcgagcaacaacaaataaatatgtcagatgaatataagaggaatgaacatgctgatgatgactcttcaatgggatcatcccagaaatgctcatcctttgatttgaatgaagaagctagtagtgaagataacaatgacaacgatgatgagggatgcgaggaagcaaaggaagaaggtacttcaactaataaaagtagcagcataacaaaggaaggaagtaatgaacggagaggtggcgtgagacaatatgttagatcaaagatgcctcggcttcggtggacacctgaacttcatctatcctttgtgcatgctgttgaaaggcttggaggtcaagaaagtaagtgagacatggattaaagaaatacttactatatacaatgagaaaatatgctatgcactcatttcttcataaattatcatgtataataaatttattaatttttataataattatgatatcaataataattttatagaatattaatataaaattattttatgtatgtctattaaattcatataatattggtaatgggctcaaggtcaagaccagtagagttcattgttttttattttattttattgatgtattgatcataaagtttgtctttatttagccttttaatatgatattactagagttttgtgttccatttacagtacccttgtattctctcttaagaaattttagttagtaaaaaaagcctattatttgccctaaaatgtttggctgaaatctttgcatctattggtgcaggagcaacacccaaattggtgcttcagctaatgaatgtgagaggcctcagcattgctcatgtcaagagtcacttgcaggtagcaacaaaattgcgggtttgatattgtattttttccccttgaaacttaaatattgatgttttattgcaataaataaattcattgttatgcaattttccttcagatgtatcgaagcaagaaactcgacgaggctgggcaaggtgagaactattttaaatcttgcaaagcgttctaaagcaaatgaatccttttttgtgtacaataagataggaatacaacttaattagtatgatcctttgatatatatcttatatattttgtaagatatagtttcctctcctataatgccggatgcaaagttcacaactcacattgaagatgttataataacacccaagatatagagaaaggaaggttgattagcttagaataacaataagaatgacaagtgttatacttaaagaggcaagtaattaacttcttttcattaatatctagctttttttcataatataatttaattataagaaacaatgttttttaaaaatgctttttttactgcttttaagaagtttaataaaactattcaaaggaaaccaatcaaatggagtgattttaagtaatgtttggccaacttatttttgggtctctcttttttcttaaaaagagaagttgaatcaaacaaaattttaagaaaaaaaatagctttttaatgaagaaaaatataaataataagtaactttcatgcttgaaaattcatataattattaaacatttttttcttcaaattaaaaaatttatttttaacttcaactttaaagtaactttaaactctagagataatccatcaatggtgtcttagtattgtgctttcatctaatagcattgatcattgtaatgtaaccagttgagagaggaaagaaaaattaagctggacggttgctggtttagtatttcgtggtttaaccataatgattgttactctagaacattatttaattaagattaatcatggtcattttgattttgtttctataacagactggattaaaatttggtcctagtcttggtcttgagtctctgccaagagggggtcatggctgtcttttttctcatttcatttcagttatttgtatatagatccatagaatgttttgtattgttaatcttagtcacgttgtagttataggtcttatcactatgggttcggtatcttttgtactcagctcgttctcaatcaagtcttattataaaaaaaaataggaggtaattaaacggtaagactccagcggggcgtttggtatgcatgagaattactagaatcatgaattctgaatctcatactttctgattataaataaaatttgtttgattaattattaaaaattattagataatttttttaagaattaaagaagttattttaattatttatcatattatataatttaatgaagaataatatgatatttttattttaataaaaaaaattaaacccaaaaaaaaacaagattttcacctttcacatgaaaagttttagtggataactgattataaaacatttctagaaaacattcttttccaagaatgttatttttttaaaaaatacatactaaaaatgataaactaaaatttctaacctatgattcccagcaaattagaagcttttcttctaagagaaggacataattaaggttgggattacttgattttacctgtcatttttactatatattcatccatattcactttgcagtattaggtcaaacatacaaatcaacccatgaacttggtcgtatttctcatgtagcccatcaatccatgaatcctagtcaacattttaagatgggaaatggaggaattattctagcaagtgattacaacgaccacagttatttgcagggtctcatgcatccctcctccctatcacattcacattcaaaagccatcgattcaaggtaaccatgcatgcacattttaattgattttattccctatattttccatggttttgcaatctaattaatacatatttgcaaaatatatacctatctatcattaggcaccaacaatggtacttcaataatcatcaaccttttagaagaccaagttactttagcaacgaagttatctcctcaacagccttacaaacgcaaggaagatcaatatcttcaaacaaaattaaactaaaggatgccaccagcattgcacccatgagaccaagccagtttcttgaagagaaaaagtggcctcccttagatattatgaacaaccatcactggaagaaaaggttacctgccaatattacttctaatgctgtgtcacaacctgttgtacatcaatttggcaccactgcagcatctctgcttagaccaggtgagttaaactttggaaacaacacaagaatcaaggagcatctatcaaactccgacgagcatcgcaactattccaacagtttaaagctagaatttgagcctccatttcggattaaggtaattaagacttaagaaactaaaatatttgtatgttctttttttttggcttaaatatattttggtgcttgaaaatatgccattttttcatataaattagatttatttttagtctttatatttaataaaatgaaactattacattttcaatccttttcaagaattaaaagcatattttttttatactttttaaaataaaaaaataaataaaaactagacacttagaaaaattaaaattactgagagaataatttatgtgtaatttaaaaaaatccatcactaacatataataaaaaagaaatttttcattactaaatttgatcactaattcattgatttttagtagtgagatatattaaaaaaccttcatattcgcatgagtactattaatgtattgaacttttttttttttttttacctttttcactattaatagaatttttatttattttttaatcaaatgcagtcgaatcaagaaaaattgcagaaagagaagcaatgggtgcctgatttgcgactgagtttaagtcagagagatggcaacaatgatggcaagactgatcattgcagagaaacccaagaaatcaacacgaaactttcactttcatagaatttataaccatgtcaatgtataatgcaaataccacaacccaaccattcatatagtctgagtaaagatatatagatactaaaacaaattaagttacacaattatatgtcgctacaacgctaaattatgggcttgccagtacatagggtttatcctcacaccaaaaataataataataattaaatcggatttgaatgtaaaatgaatgtggtggtcgtgattacgagtgagttttcaacagagagattttgtgtgtgctagtatttggtttgataaggcacaaagtaaaataaaagagagcgaaggaaaataacacatatttcatcatgttctggcgctaaccttttgtgtaagtacatccaatggatacgtagttcagcaacactgagagtatggctatcaggccttactgcaagagctccattagtacttctgcacctacagagaagatttatgttggaaaatgcatggatttagtagctatgtgttagaaaagaaattgagttgcacacacaagttgagttttatgatgagcgtggattttttacttactagtgattgtgtttttggtttgttgaatatcactagttgtgtagttaaagttaagttttgaagcagctatataaaagagtacttgaattgtttattctctctgtcacactctctataccaaagtatagaagaacaagtgaatgtgaatccctctctcactttctattccaaaatcgatcatccaagaattcagttgaattttgtttaagaactgtatctgctgatcaggatgcgcggtgctccccccccccaaaaaaaaatgttttagaatttatatgtatatttatttcgtttttaaaataatactcaatattttggtagataaaaaatattttttcttagttataaattctatagcacagtaactgttcatgcaacagagaaacctagggaatcttttaattcagatagagattgaagaaacctcaacgaattttattgactcttttaacaaaatgggttaattcacaaaattaattactaaagtaggtgttttattaaactatttatctgttatggatgatttttgctatataagatgcaagaggtgttgtcctgatatgtatcaagattataattagtttttagttttccttttatttctagaaacgtttttcttattgttttattcttttctgttataatctcacacagctaatggtgtgatgcagtagtgtgcttggttaatgagagtttgtcacatatgcttttttatttcctgctctctctctggtatatatgaggagcatttcttgttttcttcaagggtgatgaatatacaaaagcatttcagctaatatggtatcagagcccaaacgtggcactgaaatggaagtgccattagggagattaacaaagaaaccaacaattggagatgaagagagaaagcaattgagatcacaacaaacatgatgtgtggcacctgtatctaatatccacgaggaggaagaaaatgcagatgactcaccggacacatgtgctacagaggagacagaagcacaatcaactggggatgactcaatggaaggacaagaagagcgaaacgtggcagttggatgtattgaggttgtactttggacaggagaaacaggattggagtgatgaagtaatgccaacagctgtgaaacctgatctgggctgaggttggagtttgggccaattggggcagtatggggaaaatgcccatcagataaaactgagcccgtcgaattttggcccagtttggggctactgcctcctactttcccttttgcgcgtcccttgaagccaggtgggtatccatggaggcggaagcatttgtcaacagtgtgaccagtcattgagcaatgagtacaaaacggacgacgaccctttcctggcaactgagcagcattcacaatcgggagagaatggacacccaaatgcatgtttctttgacgttcttcctggagcacaagagagaaaacttttccaagggatggcaaaggatccatgagcaagatctgtgcccgggttgaagaaaaggaatcgttaagtcccatcaaaaacaggatggagcgctcttgctcacgaaagaggttccagtctttcagtccaccacaacggcaggaaggcagtggctcaaattccttcaactcatcccaaagtatcttcaatcgtgtataatatgagttgacatctagagcaccttgagtgagtgtggtaatttgagatttcaattgaaaaatccgaggaccatttccttgttgaaatcactctttgagatcaacccaaatccctgctgcagtgggtatgtagaggagactatcagcgatttcgcgtgagatggaattgagcaaccaggaagtcaccatgttgttgcatcgaatccaaaaagaatggagtaagtcttcggaatctggggaaggaagggaaccatcaacgaactgcaatttgttctttgcagtgagagccgtggacatagctctattccaggtgtggtaatttgttccagtaagatggtgagtaacaagcacaatatagtacccaggtgtgtttcttggttatccacctgggtacaaagcttataaaattctagatgtcacaacaaataaggttttcatttcaagggatgttgtttttcatgaaaatgagtttcccttcaaacatctgcctccacatactaatgagatatttgctgattctgttttacctactcaagtcccttcttcaaatcccttagttgataaggattccagtttcccctcccagccacttgaaattcgaagagtgtctgatagggttgtcaaaccacctacatatttgaaggactatcattgttatactgtgaattcttctacacagcatcctctagagcatattctctgcaattctaagctatcctcttcatatgctgcttttattggctcggttaatttacatcctaaaccttcttccttctatgaagctgtcaaagttccttcctggcagcaggcaatgcaattagaaattgatgctttagaaacaaatgggacatggtctctggttccccttccctctggcaaacgagccattggttctaaatggatctacaaggttaagttgcatgctgatggtaccttagaacgttataaggctcgtctcgtggctcaaggttttaatcaacaagaaggcattgatttctttgatacattctcaacagtagctaaaataacttcagtgcgtttactacttgctttagcctccttgaatggctggtctcttactcacattgacataaacaatgcttttcttcatggtgagttggatgaagaagtcttcatggttccacctctcggttatctccatcagggggagcctcttccacccaacatagtttgtaaattgcacaagtccttatgtggtctcaaacaagcttcgagacaatggtttcacaagttttcacaagttttgattgctggtggccttgaacaatctgtagcagattcttccttttttgtaaaaaggaaaagagactgttttctggccattttagtatatgtggatgatattatagtggctggaaataatgatactgaagtgcaacaactaaaaggttacttgaacaatcattttaagttgaaggatctaggtaatttgaagtactttcttggtatagaaatagcacgctctcttaaagggatttccatttgtcaaagaggatatgcattgcagattttgaaggatgctagtttaactggatgcaaagcaaaaactactccaatggaggtcaacataaagctgtcacaagaagaaggtgaattattagatgatcctctaccctatagaaggttgattggacgcctactttatttaactattacaagaccagatttatcatatgcagtgaataggctcagccaatttttagctcatcccagaaaacctcatttaaatgttgtccacaggcttctgcaatatgtaaaaggaacggttgggcaaggcattttttatcctagtactgggcaattaaaattgaaagcatattcagattcagattggggagcatgtaaggatactagaagatctattactggtttttgcatcttcctaggggattcattgataagttggaagtcaaagaagcaaccaacagtagccagatcttcagccgaagcagagtatagagcaatggctaatgttacatgtgagctcatttggttaaggtctctctcgattaattttggcatattacatcaggaagcagcattgattttttgtgacaataaagcagctttacacattgcggaaaattcagttttccatgagaggacaaagcacatagagatagattgccatctagttagagaaaaggtgttgaaaggagaagtgaaggtgttgcatgtttcttctcaaatgcaattggcagacttattaaccaagccattgtttcctggccagtttacaacattgctcaacaagatgggagtgttaaatatacactctccatcttgagggggagtatcaagattataattagtttttagtttttcttttatttctagaaacgtttttcttattgttttattcttttctgttataacctcacacagctaatggtgtgatgcagtagtgtgcttggttagtgagagtttgttacatatgcctttttctttcctgctctctctctggtatatatgaggagcatttcttgttttcttcgagggtgatgaatatacaaaagcatttcagctaataatatgcaccatctttgttaggtatttagtgttgctcgagtgaatgttaaattactaattttaataactaattctcttgtcacatttttacttaattttctcattcaaattgacactaaatacggatgactaacacttattaaggtggtgctttttaacacaagacaaacaaaatatataagatatatacttgacaaaacatgacaggtaattagttgtgtaaaacacctacaaaataactcattttgatgattaaaaaaaaagtcaattttattacacatgacttgacatgcatgtgtagtgggtatcacgtctatctatgctacatgtcatcttgccttttgcaaagggaagtggtacatatgggttagtcttctcttctactagagatttccaataactgaagaggatttctacttgtgtgtatgatgttgctctaacgtgtgtagatgggatggtgcttttatttttgttatcatgttatagatacaaattatttattgattatgttgatgattgttaaaaaaatttattggccacttttaattttttctaataattaatttttgctagaaaattgttggaagtagaaacaaaaagaaagttacttcgtgaaaaatgataaacataagaaaagggggcaaaactatttataggaaattagggtattaattagaggaattttaaaataatattgaattatcatgattgttgcacaaaaccttgaggcagttacaataactccctcgaagattgaaaaattaaaagcccactcagagttcactacatgttttattgaagatgaaaaaaatgaagatagtaaacttcgaatgagaatgtgaaaaaaatgatgtcacataatgttcaatatacatagtcacttagatggaattattattaacttgagcgccaaaatacattttaagcatctactaatttttcgtatcatcttagtcacatcaaaacattgacaaatcccaacaaaacttgattcttggtctatcaagcacatcagagtcaacacttttcaaagtcttattctaagtcaacaatccatgtcgaagacatcaactggccacctcaaaccattccccacatccatctcgagtttggttccttttaaagttttcggcaagagagagaaagactcaaagattttgtgtgctcttaccagaaatttccagtattgaagaggattttattcatccatctaagacaaatggacatacttaagaagttgcagtcaatgtatttgtcagagaaaacttgaaaattgtgtgcttcagttttcatagcatttaaataatgtagaacaagtattttggataaggtattattaatcagtgtgtttaaaatattgatcaaaaaataaaataaaataatatttattgtgtaaatcataaaagaactaaaaaatcataaacaaaataattttcaatctttttgattaataagccgtcaagactgtgatcaatgagatgtactttgccctgttcacgtgctaggtttactagaaggatcatgaagagctcatatgaagcttatttttttaaccttagaaaagttagttatgacatttctatagtattttttttttctttttgtaacttattataataatcaagcttatgaataaattcccattgaataagtgctattgcaccctaaatcggaaattagtttgattttcatacttggactgttggacataaatttatgaaagtgaaagaaaaagacagacaaaaatctcaagaataatttatgtctgtaataatgtatataaaaagaagaaacaattatgcatgaataacagtaattactaatgtcgtttatatatacattcatatgtataaaatgtcgatacttaaagattagctgcatatgatgaaacagaaggttcctttcccttgattagcaagctgtcaggaagtaccaacaaggtgaaaaggcaaacaatagtagtgcatatgcacttctctgggggtagcttctgtaattttcaatccaccgaaagtaccactagtccaaagaagcttcattgtttttattgatcaccaaaaattatattgattcctctctgtaaaatactgatatgatgtcaagaatcattgaatcaagattaagaagtcaacaaatggaaacaaaatccaatagaaaataataacataagatatgagggtgtataaaaaaacaaaaatctaacctatgctgtcatgccaaaaaccaatagaaggagaactaaatcccataagcctgaaaaaaaataaaggacatgaaaagcttggaccataacatgatatacacgccagaattctatctctatgatttcatatgctgagatttatacacgagtagttcctgtagagaaaagttaaatgtgagtttttatcggttttgtgacttaaccattgggggaagactaaaaataaaaaatgaaaggctaaagggattaataaggttaccttagaacaggttatatgatcatgattcaaattcgaagatttcacttttgtttcccacttagtatagcttgatgctctactaaaaccctgccttttagcctgggaatgtgtaccttgatttgaacgtgggaatgaattcttagaagaaactagaggcagggcacgacaaagccaggattcagaaggtgactttggcaatggtggtggggcaagaggatgcagaacatattcattgccaacttttcctgaatcatcaaccactacaatttgctgcttgttgatctctgcatctttgtcaaatgaacttggcacaagttgcaaggacatcgacttttgattaatttcttgatcggctgccaatctttcagctttatcttctttggccatgagatgtaacatgctagacaaagttggagaattggcatccacaggattcaacacttgggaatccaaattctcctccaaagcttctaggtgcttcatatctcgaaaataatctagtagggaatttctgtcttttcctaccactgttgtgttacctaaagaacgcgaactagagcatgatgattttattgtacttgcagtatctatgtacaatgtcttttcaatagtaaggctcccgaagctatagcttttttttgcttcttgtgatagcacctcttgaatacttgaatgccctctactcgggaatttcaatttgccagaatgattattatcatcttgtttggaatcaccaagcaactttgctccaggaaagggaggttgaggtttacttcgaaaaggagacacgccagcagaaacagctcttgaacgacgaaagggagagagcctacctagctgcttcaattcacctgagtaggtatacctgcttgattcactagtccattttttaattacatcctgcttgtctggtgatgcagctctagagcttgattttctcttattaataacatcccaagcctgcagcaaaaattcatgactctggtaaaaatgagttcaagtcatgattggtgaaagtgttaatatacagaaggagggtaagggtgggaaatgggaatggatcttccaatgttgaattttattgtacttataatgtgacattgtgtcaatctctcttcatggggggtattaaatagagaaatagatacaaattttgtgaatattaatgaagagagaaataggtacaaaattttcacatagaaatgtcatgaagggtacaattgactatagaagggtgcaatgcaagaatagaaagtaagagttatgtagttgttaccttctttatagatggagctggtctatgcgagcgactatgagaacttttatcaggttttccaacctcataggcagaatacaagggaaactgattccccattttcgtcccaggcattgaatttaataagcacaatgaatttctaacacataagcggggaaataatccgcaaactttagctgaattatttgcataatcattagtttcatcgtcactttcctcctcttcttcttcctcctctcgacattgaccagtatatggtacaatgtcagcgatatgtctactaacaaatgacttcttttgttcaggaaccaatttgataaattccctaggttgttctgtcagaacagtttgctttctagaagaagcatattgaggaggctgtatagtcatagcctttgctgcagttaaaaacctgctcatcatgaaatcatgagcttgtttatcagtagaagaggctccacacatatccgcatccacattatctaagccactcacaccactcacactacagttcatagacaatggctctgtaggtgacagtgtttcaagtgcatcagaataaacatcaccatcatcatcatagtcatcattctcttccaccttttttattttctcatctttacgttctttgtcacaatctattttctcacttaaagaatttgatatgcttgggggcctaaagttatttgcaacattaggttccttttccaatgattgtttggcaacatttgtggattttccaggggggggagttggggtaattgaagcctttgtaggaggttgaggttctgatccatcataatcctttgaccttccagggatatgctcccaattgaaagacactgcgacaggttctgttacctgatccaaaatggaatctgatttgtagtgtggaagtgtttgtggcttctctaatatctttctatttgcttcagttaaggatggtgatgtaccaaaagagcgcctcaccgacataagaggagcatcaatgttcaatttcctttcattcatcatgttccacaccaactcaactgaactcttctatgttgcactctcaataataagttcaagaatcaagggaatatcatatgctactaatttcagcacaaaaaggatgtggtataagaatccttctattcaatcaagaaaatctgaaaagagggtgcaggaaccagatcattacattttaaattacaatttaaacagcagattctctgtttcaaatttcaattcaaccgacttgaaccaagatcagagaagtacaataatgcaaccagagagcaaaattttaaaccaaaatgaactcatgataacaggatattgatgactgaaataactttccgttttctccaccattaaccaaagaaaaagagaaattctgtaatggtctattgagattgtggaacgggaaaaaaaggtatgcactttagttataaaagttttgacatttgttgcttaggaaaccaaatattcaagcctgggatgatcggattcctataaaaacctattttcctcttctcaataagccaattatacaaatatttaaccatttcaagtcttgctatcaaaaaaacaacaacagaggtaactacgtacaattaataaattaaacagataaagcaagagaactttcatgaatcatcatatatagcagctaacaagcttaacttaaggtcccactagagtcaacatcaacatcaatggtaatgaggaaaaagatcaaacaaacctatttaataacaggatgaaacatgggacgtggtcatcccaggcatttgcagttcaagccaaattgaatagtgtctggggtaggtgtgtttttttttttttttttcatggtcatgtagcattaagaatgcgaattggccagataaaactcaaaaaatgggatagaatagaatcatcaaataagtagtgagtgaacatcactgggtgagagagttcagtcccatgagagatgaatgaaacacgtcacaaggaagtggttggtaagttgcaaaatggaatgaatgagtaagaataaaggaaagcaaagatagagacagaaaggttcggtatttcgtcttcttttgctttatgcctactttcggattttacatgtgtctgacgaagacaacaggatggactaaatattccactccaatgctattagtcggtacactttttttcactgtgatgaggtgccgttgcaaccacgcgcttgctttttctactgatctactatttaatttttattttgtattagtgaggagaaagagagtgaaaaaagatagaagagagaaataaacattaaggagaagaatcccggccctttaagcaaattggattttcttttctgccacaatgagagaaaacaaatatgattaatttggagttggatcaaaaataaataaaatttcatcaaaaattattttcctcaaatgaattcgaatattagtcaaacaattcaaccttaattttaacatattaattactgtttacaattatttagttaaataaaattattttaaaaattaatgagtatatatgtatgtagataattttaaatttcaaatatatcttaaatttaatttattagcatttttaaatattttgctgtttttcttcatctttatttaccaatttgaattgtaaaaattaagtttattatgtattttaattatgtatatactatctcacttcaaaaaaatgaatttataataacaaattccagcacaattgacatataattgagtcctctaaaaaaattgtcaaattgactttgttaaatatgtttattagagtttgaatcttggttttatacataaaactagaattcattaggtaatgatataaagattattattgagtaattactgtttaacataaattatgaatatacaactacattaaaatatttaaaataatttttttattcataataatcatatctaattcaatcatgatcacttataaaataatattgatagttttagtcgataaaagtaaaatacttttcaattgtaaatgatataaatttttaaaattttacacttaaaattattttcccaataaaaggataaaaatatttgtaatttctttaaaaatttattattttaataattaattcaaaatattacactattttgatgaaaaaagccaacttctcattcactggtttggcagaggtaatgcacgtcctcagtcctgcggagaaacgccagtattacatctttctcgtctttttctgcactataatttgcaaaagaacacccatggaccatggacaatgtcaataactattaaatttcagtataaattgttatgaattaccgttaacgtacgcttaagtttttagctaaaagtttataaataattttatattaacgcattctttcgaaatttacttcttatttaaaatagagaattcaaacttgaattcacttaatagtaaaaattcaatacaataactagatatataaaaaaattaactctgcgaaattcaaatttttacttaaatgttcataagtactgtaaatttatatgggacaattatcaccattacaaaaatatcgttttttttttatcattttggtataaaaaaaatagcgttgggggacctctcgagtgggaagatggcatgagactcgtgcgaataaaattacatataaataaattctagtggtatatgacaagaatgaataacacgtacttactccactcacaaatttggattggaccacctaaaaacaaaaaattaaattataattttacttttttataatttttaatatgtaatttggttctcctgatttttatcatgatttttgtctctctattttaaaatttttaaaatttaatccaattctcaattttccaaatatttttttcttttactttggtccaattaaaccctattaatctaaaatattcacttaatatatcatttaaaataatttaattaattaaaatataaaatgaaagaaataaatgtatgcataattaaagattgaacgaaaattgtaatttttttaaaatagaaaaaacaaaatcacatagaaaaacaggaaaatcaaaactacagattaaaattataaaagaatcaaaactaaaatttaaccaaagaaaaatgagatatattatgaacacattctttagcgttagtgttgggacacattttctttaattaatcaaaatttattgaaactatgaaataaaaatcagagaatggttaaataacatgtgatttattttacaaacttttgtaatttttaataaaatatgtctaaaagaatgtgtgtcggagtatatttttaacattttcgcaagagaaacaaaaaaaaggcataaaaaataggaaacgaattaaacgtgagtattcgatcaatactagttcacctaacagctaggtggcaggtgaagcaacttcatcacggactcaatatatatgtcacgcagcttcacaagaacggcataaccattaaccaggttactgatttctgtgaatgatgactttccaaatgaccaagttatttattgttttcttgctccttgtttccttcacatgtagtctctcccttgctatgtccagtgaccagttggagaagttttcttgggaggatgaagaagtgtttcaagtgtggcagaaggagcataagcgtgaatatggcaacccagaggagaaggcaaagaggttccagatattccaaaggaatttgaggtatatcaatgagatgaatgcgaagaggaagtcaccgacgcagcatcgcttgggtctgaacaagtttgctgatatgagtcctgaggagtttgcggaaacctacttgaaagaaatagagataccctcctccaacttggagagtaggacgaagaagctgcagaagcgtgatgatgatgatgactgtgataatcttcctgattctgtagattggaggaacaagggagctgtcactcaagttagagaccaaggaaaatgccgtaagattttattttattttccatatacgtgcatctcaacaataaactttttgatgtctcaaatttgtgttaaaaaaataatctctttattttcaagtaagtgacaaaatgagttgtgttgttcactgtagccggctacatatgatatgattttctaacttagaattaaaaaacatttttcaaaaaacatataattttttattctcaaaattaattaattcatacactataaatattttgcgaaacaactaaaagcaaagtcattggtttacatagatttttgttttttttttttacttcttcaaaaagatgcgaatagtaaaatagtttcattatacaacattaacgaaatatacatatatatatatatatgcacgaattttttggactgatttaacatgttattttgttagaaagccattgggctttcagtgtcaccggggccatcgaaggaataaacaaaatagttactgggaatcttatcaccctatctgtacaacaactcgtggattgtgaccctgctagcaatggctgtgctggaggcttttacttcaatgcatttggttacgtacgttatagataatggtggcattgacacagaagctcattatccttacatagcccaaaacggtacttgcaaggtctgggttaacacttttttcctagcttagtttttgtattttcaaattttaaaaaataaataaataaattggaacaataaatttagacattgtttttgtcttcttaatttaaggttttctttttctttttcttgaaggcaaatgcaaacaaggttgttagtatcgataaccttctagttgtggttggaccagaagaagctctcttgtgccgtgttagcaaacagcctgttagtgtgagcatagatgcaactggccttcaattttacgcgggtgtaagtatctttatttattgacaagtggttaattgaatatgaataatgcctagagattaaaggttattcaaaattgaaaactttgggtatgttccatgtgtatgctaattgtgtaaattattgatttctcataatcacagggagtctatggtggtgagaactgctcaaagaattcaacaaaagcaactcttgtttgtttaatcgtgggttatggttcggcgggtggcgaagactattggattgtgaagaactcgtggggaaaagactggggagaggaaggttacctcttaataaaaaggaatgttagcgatgagtggccttatggtgtatgtgccatcaatgctgcgcctggttttccaatcaaagaggttgcctcatctttggctttatagtgaattagactatggagtactatccatccttttgaaacctataggtttctctaagcacaccaacattgtagtcttgtcttggatctgggcatattactacttaagtacttgtcctttctccaaaaatgataagtttatgaactactagtgcgttttttaattcgggttaaggtgctttaatataataatggatggtggtagttctaccagttggctttggttaatttatttcttggagcatattcataactggtttatgacttgtaagcaaatatttcgttagtaaaaatgttaagcacaaggtatatatgtacaactcaaaacgtcaatatatataatttgtatattgtaacacgctaagaaaattgaaacaaaatatgcatgtctttgttaaaggaaaaaaaacccaacctaaaacatatgccttctcaaattctgttatttcctattctattctattttgatcaccaaataagtcctgcaagttatcattgacaatataagtaggtggagcaacaatagtgggaaaaaaccgaatactaagtggttcatggaattcaagtaaggtgaaaatttgttttatgtaactggaatatgcattcctattaatggcgaataccttaggataagcattgctattaactgaaaaatatctaatgatttaagttaatataaattgttcataataaatagcttaggataagaatcttctattacatcaatcattgggttgttgcagaattataagacctcactttattcacatgattgagaatgatttatttaataaaagaatcaatatatatttgaatcttattgtatacaaaattttattggatcaatgacaattacatgttacaaatgagattagtctctaatccaataaattaaggggcacccatggtatctaatctaagaaaaaaatatatgttagtctcatagattgtattctaatataattgaatagataaaaaaattgtacaattcattcaaaatactggtaaattcaattcgttaaagtgcatagttttgaacaaaataaaattatttaaaaaaatctccgttataatttcattcttttattgctacaattcccaaacatcttctatccattccatgaaaaggaaataggctcaaccctaagagtgtgatttggtttttatacgtactaatcttcgtctcctctcaggaattaagatggaagaaaaaatgtaagaagggcttgatgttcttgaagttgttactttctgtcttgatgaaaccaggtttagaggttgctctatgaacaaaaataataataagcttaacattgttaaagagtgatattcatagttacgtttaagttttacgaattgtctcgttgaacattttattctccttttatattatatatcatactcttctttttttgtcttgatcttatttatataaatttattcttctacatgtagtcctattacgagataaatttgttcaaacacttgtctccactgagtctattatattgttcagccctttttaatttccatgttacattggggatttatgcgtagatttgtccttttgagcgtgtcagcagtgcactattgcttctgatttatttgaatgatatttttttcaaaattcaaattcatctgtttgatttagtctgtgatttgtgtttttaaaattgaactaaattatacacttatattactttagggttagtgttatgtattttatgttgtgtcacttgaatttcatagtattttgtaagtgttatatatataaattttttataatgtttatcgttttctttttttgaatatatttaatctaaaatggatgaaagtttggtaaatttttattatagaaagtttgacatattaataagtttcatagattgttattagtaaatttttaatgtaaattaatttaaaagatgaaaataaagtatataaattttaatgaaataatattttaataaaaattacaaaaattaaatcaaatcataaaatattgatttggtttgattataattttattttaaataaaaattgaatcaaactaaatcatgtatgttttataagtctggatgactttttgatgaataagtgaaccaaattgactcacaaatgtccctacttttgtcacaagccagctgcaaggtcgatctcctttatcatcagattatatagtggccttttctttgttgagtaagaagaaatttagctggttgtgaaaaaaattataattcttgcaatttatttagtttgttttaatatttttttattgtaggctcaaaacgcttgagggaaggacgattggatccttgagctagggaccaatcatattttaatagagtgccttcctttgataaccttaggtcgtggggaaatgatctattaaggttttctaaggacttcttagtatgttagacttagaggttcaagttctaacgccaattgtttggaaagatccaaatatgatggacggagcagacagctcaggcagcgacaatggctgttcctagtgaatttatgagacttgtattcaccggtgcaaacatttcaatgtcaaagtcaaatcgtgtaatatgtgaattgaataatgaggttcaaatgtatatctgacatgaaatgtcttacatagtgatagatggagagaaaattggttaagtggttactcttgaccatgggtcgtcatagtcattttttattattattatggaaagattgaaaaacaactaaaaacacggataaagtactttaaaaatacaacaaccaacaaatcagccaacaacaaaaggaaaatctctaaaaaaatgtttggatgtgaacactttttaaaatattcaattagactatttatgtaaacgtagtttccttgttaccaacacaaggtcgagggattaattaggaatgaggagttaaaaatgtactatattgcttacatcacctaacgaccacgaatatttaaatacagggtgctttcttctatatttgaagaatgagcagcatttctgccttttatgtatgctacattaattcaacgagtgatttcggtcccccaattccacagaaaattaaatgaaattccgttatctgaagatgtttgtcaatttaagactaatgcatagtgggaatgggattagtggtcgtgacttgtgagcattcatatcaactagcaaaggccactgccagcacctggtttcaactttcaaatctcaatcaagccaacagctgcaaacgaaatacacatatcccctcttatcagtaagtcagtgtttagatgaatattgataaaattaattttgaatgaaattgattttaaaatcatgtgatttatgtttgtatgttttattatagaataaaattaacagtaaaattcaagtataaatttttaattcaataaaaaattattcaaaattatttgaaccctaaatcaattctaaccaaatatattaaaatatatccaaaattaattataaacttataatcaattcttaatcaaaccaaacacacaggtcccgcttgccgcaaagtaactacgagtttcatacatctacgtagaatatatactacattcactaaagtactacaatcaattaaaaattcaaaacttttaagttttaatgaagactttatcatttcttaattattattttaaaatttaactaagtttttaatctctaattttttttaaaattatgtatttagtttctaaatttttacttaattgatcaaggtcttttcactattttttattaaagttattagtctctaaattattatttgactgataaatgtctttcaaattttttcattaatatttttaatccttacacttttaaaaaaaattaatttttaatccttaaaatctcattaactaaataagaataatagattcgaactttaattaatttttttaatttattatagttaatatattctcgtcctaaaatcactctattgacgactttacttgttgattatctctggttcacgatatgaatccgctaaggaaccattcgtcaatcaacatgcacctggaattgattcttggcttctactaatattcatttgttaatgcaaataccagtttatcagaaccacgtgagcaagaaatagtaggctaaagcctaaaggggaatatgttctttaatttgttattttctacccttaatacatggtttgtgttcctttttactaacactaaaatcatagctaatcacgtacaactgacaattttcacgtgatagaagaaaaattatggttacaagagttccatcttataaaaaaaacagtattttatcaactaattgtgccatgagcacaactttaatcattcttctatttctttattaattgactaaataatgttgtcagatatcacatggtttcggtgctctagaactgtttttttttaatacgaggcacacttccgatttgttaataaaagagtactcctacatcttatcttttgattgttccaactaatatggtaaaatattctcgagaactgagcaaatcatttttagtagtaggcttacttttctcttcatgaaattctattttgtttgcttaatagatttaatatttgttcaatttagagtttgatataagtataactattttgatatagttgaatttaagttactgaatgtgattgaaatatatctaaattaataaatatatttggtaaatcaggctttccagactcgtcaggagagagtgttaaattgttgaattgggctaaatttttttcttgctgcaaatttttattgttcaaacttagtcttatgttaggctaacgggttaactacaaataaacaaaaaataagattaaataattttataaaatcttaaaatatatatagatttaaaaaaattaaaatggttaattgaatgattgggtaaattaaactcaacttttccggtctaaattttaggagctaagcctatcccaataggccaattgagccaggatagatagacttaatttttttaagcgttttttttttttttgtgctgattaaaggggcaaacgcccgaaaaacaataaaaacggaacagttacaccaagcattgaaactcagcttggatagtagatactacaaacaagggtacctccacaaaggaaactaaaccatgatttaaggacagaccatacttagcaaaatggtcagccaccttaatacaatctctaaacacatgaacaaattgaacactcataagaggcacaatgcttgccttaatcgcatccacaatacacttatcactaacatgaagatcctgcctttaaccatacgaatagcatcttctgaatttgagtggatttccaaggatcaaaatctttttaaacctacttcttcttgtttttattataagcaataaaaccatttatttattttttctcaaatataagcaaaacttaactaatcttgcattatttaataagattatctttaaaatgttattcatttaatagagtcaaagacatttgttatgtttgatattaagttttaaggaaaggttgtttagaaaaaaaatatttttgttttagaattaatataatttaatgaaatttaataattcttaataagtgtgaaataaattttttaacttatcaagagggagtaaattttatcttaattaagtattgtttagatcaatcataaactcgatctcatattaccaattaaatgnnnnnnnnnnnnnnnnnnnnnnnnnnnnnnnnnnnnnnnnnnnnnnnnnnnnnnnnnnnnnnnnnnnnnnnnnnnnnnnnnnnnnnnnntttattataagcaataaaaccatttatttattttttctcaaatataagcaaaacttaactaattttgtattatttaacaagattatctttaaaatgttattcatttaatagggtcaaagacatttgttatgtttgatattaagttttaaggaaaggtagtttagaaagaaaaaaaatatttttgttttagaattaatataaattaatgaaattaaccaattcttaataagtgtgaaataaatttttttacttatcgagagagtaaattttatcttaattaagtattgtttaaatcaatcataaactcgatctcatattaccaattagatgacaatctaaattttgtttatactattaatatatttttatactaattttgatattttatgaatttactcaatataagactaaacaatagacaaaaattacttatgtacatgtgttctactattctaaaatgtaaacatatatttcattaaaaaaatagacatcttcatttttttgttaaaaaacagtaaataagttattcattaagagtgaaaaatgtatttttatacttatatcaaatcataaattgtggtatataggaaatttattgatttttatattaattaattagttatagtaacattatattttaattgttatataggtcacatttttatagaatttgactgtcaaaacgcaaaatgaggaatctttaatacaagatgtttaagcacttctcgtattccttcagtttaaactggcctttttttagataactggcattaaattataattaatattataaattgataaataaattcttttgatttgttagtagttatccttttgtttaattttgttaacgttagttttcacagttaattttatcataaaaaatattattacattgaaaatgtaaaagtataacatttctatttttttctattttaattattaaaatcaatcttaaaaattactatgacttttttttgactgaaaaattacaaagacgtaatgtttaaataataataataataatgatcataataatgtattggcatagatttggtaatgtaattatggagaaagcatgctactttataattgcacttgtcacacttgtgcttaagtgtttttcaataatttttttttgccttttgctgttaaataatagtaataataataaaattaagtattattttcaatattttctaaacttatgagtgattgtgtgtatgtttggttttcattgaaaaaataatatcatggtaaaaataattttatcaaagtgcattaaaacatgtagtaaaagtaaaagggtttaaggaaaaagcatggaataaagacaaaatcctcaatttcttatcctttgcttaacacactaatccattccatcaaatgattcaaatgcactcaatctcttttttcaattttcataccattttcccagttactttccttacctaaccctgctactccttttcatacatataaataatcacaattttgtccattcttccaactacacccacaaccaggggcaaagtccagagcttttaaggcgctgtgcttggattcaaacatgcccagtttcatttttttattctaaaatctaatgtttgaggtaaatcctcctctttgtgtctgattcgggtgaaacatcctattggtggtaatccaagtttcattttttacctttttgtttgcgtgtgtttatgtttttgtaacaatatctgaaggttatgtctcaaaacatgaaaaggggttgttgaaagatatgtattttccgccttttatttgatcgcattgttcatcctctgcaaataacagaaggttttttgtttttttttgttgggtttatcactgtgggaggaatgcgttatgtattgtcaggagtttcttttccaaatttcttcaggttttgaaatactgagtggaagaatttgatattggggttatggatcaggcaaagagcaaaggcagtgttgagattttggattatgtcgatgaaagggtggatgaggatttgaaccaattggttgaaggaaatgcaattgatgcaggaggtggacatagcttggatgaaggagttaatgtaagtggggaagatgggactccaaaagagatgtacaatgatcttcgattgaatagggagctaaaggaggggtctcaagaagctaatgatcagaacatgggtgacccacaagaaattaatgatacattgtatagggttgatcaaggaactagttatagttcaagaaatttggttagtggggaagtacctgagacttgtgttgcaatagatccttgtactcaggttgagtgtgtcaatggagataataggaaattggaagcaaaacctaatgaatcagagttgaacaaggtgtccatgaaagtgacaaatggggtgtctgagacagataaaaattcatgtgtgattgatataaaccgtcacagctgtgatgggtttagtgagaatttggaaggtgaaatgatttgtaggatttgccatctggcctctgggcaaccattggaagcagcagatgttggcactgcaagtagtgctactactcatacagatttgattcagctcggttgtgcatgtaaagatgagctagggattgtgcatagtcattgtgctgaggcatggttcaagcttaaaggaaacaggtaactgttgcttttgctaatacttgtttatttctagtatgtagatcaacattttgtttagtttttcttgaagttttttgttaatgcctgcaacattgaacatgccctgaggatttctatgtttctgattaattagtattagtatttagtaatcctatttggcacaatttcagaatttctgaaaaagaaatcgtcttgggctatacattattttaataatttgtaacatttatttcttttctgataatagtcggttgtttttttcttttgcttaataggtagattttttcttttatttcttgtcttatgaaatctttgaagttctgctgcatacttgtactgttatgcatatagcattagcgttactattgtcattattaaatttcgttatcatcaataggaaattctaaattacaattttattgctattattatcttatcaatattaaactcataactccaaaatatttgtaaatttgaggatgaacttttgaaattgtcttcattgtttatcattagtcagttggttaatgtatgcagctcatagctgtttcaatttttactggtacatctctaactggagaactgacatcattgttatgtgccgtgacacatggagtttctattggtaatatacttaaatgaggggtgagctgggcaaatgcatccagaccaatgttgtcaagattgcgagtatgatcgtatactcgtgcgatcttgcgattttcagaggggtcgactaggttactcggagggaggatcgttgactttgcggatcgtttggggatcgagcgtttgcttgcgaggtggatggatcgacgatccgttttgatcccaattgggtttcgttttcggtctcgttctcgcgagagttttgagaggaggtgccgttgttttggagctcttcggagagggcagtggcgagaggctggaggagcttctcaagctcgtcgatgagagcgaggacggaaggtttggagcggagaacctcttcctgctccttgttcagaggcttgctctgggtgatggcctcttccatggtgagggtgcagttcagcttcttgcggagggcgcggaggttgcacctccttctgttggtctttgcttaaatcggagttgtacggtggtgtcgcctcggagaaggattgtttgcggcggagaaagagataaagagtgggatttggtttggtttggtttggtgtgagtgtgtttggagagtgtagtatgggtttgggagagtttataatgagtttggggttttgattttgtgtgtttagaatattgggaggaaaccgagtgggccgaacttgttggttttgtggacatcttcgattggcttccttggatccaattagatatggacacagcaatcttctgtgccagctggatataacggatggatatgttgagttgaatcatcctacacagaatcataccatgcaaatcaaagagaataaggatattattattggatttcgttgtgatgctaaaaatggaatttgatttgattgtcatttaagtatttcaatttcaattgtttatgaaaataatttcctggttagctaaattaatgagttcaaggaatggcagtatttttttgttactatctcagagtgaaaaaatgataaaccagtattgtttttcttgtctatgttattttttatgtatatgcatgtatataaatataattttacatatacacgtaactcttacgatcctcgagttacgatcttttacccccccttccgatccccttccgatcctcgagtttgacaacattggtancccccccccccccttccgatcctattacgatcctcgagtttgacaacattgattcagcacctggttggttttccttctgaggtattagcaaatggcctggtttctagtggttgtgaactgaggttgattgacatccaaaattccaaataatgacatcaagcattagtttagtgtatagtatatgaatatatgaaataatatgagaagctctctctcaacttgcttcaatctagagctttgtcagagtctcagtcgctgttttcaatattgtttacatcaaaattcgaattacgatatgatgtttcatatgtatgctaaattcaaatttttgtggttcacaattatactgttcctggtgaagaatggtctgggaataccattttttttggtcatttgaattctaatttgtttttgaaattactctaatgtatgtacttttttcatcttaggacccttaagaatttgaaagctgttgggtgggggtgggggtgggggaagctctatcagtacttttttttccattcacgtcctatgtacttgtgggttattctttttgtaatttgatatcctttcttgtttattaagctgagagagaagagtttacatgtgtttttttttaaacatttacatggttataagaatgttatcaccaagcatggtcaatcttgtttcacattcaaactaggttttagttcaataatcctgaggttccttttgttctatgttaccttccatgatcacaggttgtgtgaaatatgtggtgagactgcaaaaaatgtttcagatgttacggataatggatttattgaagagtggaacgatactagattcatggacagtgataatacctcatccagaaggtttggtggatgctggcgtggacaaccattttgtaacttcttaatggcatgcctggtaatagcttttgttctaccatggttcttccgggtaaatatgttctaatggaggagtcaaacactattcttcccttcaaatctttattcctgcctaaatgatgagtgcatcatttgctccttgcatattgtttttctgaaggggtggtaatgcttaaccatgaccaacttcacatttctcagggtatgtagttccctgaagccttgaaatttggttgtaaagaaacttaccaacttggcaagttatggccaaattgtttcccaattgcattcttttaattggagtgcgtgtggtttactgagatatgtataacagcgggatccattttataaaggagtaaagcaaagaagataatttactgtttcccaaaggcataaatgttatgttagaactttgaaacagtacattattcgctgtaaaacaatcaaacaaaaggagcctctccttgattttccttctccctttttcgttttttcacttttttctaatctctgttgacttgtctgctagtatgaagttcaaagaatccaatgtcatttgttgtcatcaatgtgtttctattgccttctttttgtttgcaaatgttctagcttctaacctaagtaaaattggtcttctcaaaagctatatgctccgaacgcttgccttaattttgaagctacatatacgaggggcaaaatttaatcgtgataaaaaaatttaacctatggattaaatacacatgtaaacttgttggggatatgacatacacataatacatacatataatattaagaaaataaaataaaatcctagtggggcaaattatattcagaaggttatgtataggtttgtcactgatttgatcatattcctcattttactaaaagattatgtttggtgaaatatctttgaatataattttaattttagtcatgttttataaaatacagatacgggcatttagttatccaatctgaaaaggcacaggcatcgaagttaatattacccatgcatataatataggtttgggtacgggaatttttttaaaattgagagtatggagacgaatgcttcgagttcaactgtaatcctttaaaaaaattcacaagaaatcaccatatgtacgtagtgagtcattaataaatataattaattaatataaagcttattgtatcaatccgttgtagtctagttggttaggatactcggctctcacccgagcgacccgggttcaagtcccggcaacggaagtgtttttttcaattttgcaaacaataatgtcgtaacattattaacataagtacacgtgggaactgagaagatcagaacgaaaacgaggcataatttttttctttttcgtgtaggtaggtaactaggtatgtatagtgggatcaatgttgtttgaagacgaagacagaggccaacgctgaccatgtcgaaaagtatagcaacgttgagcacttatccaacatatcatagtcataggaacaaatcaaactatgcaaaatctccgaattgtttcatcttcttcagacaatctaggacaacatgtctgtcaccttcgaatttggacctttcttgcggtagcagtgttggtgtctctgcggctttgtctgagaccacccataacaacgtaaccgtggacaaaaatgcaaagatttgcaagttctgcgaaatgggtgatctgagaaacgccatggaattgctctcaaggtcacaaaaatctgaacttgagttgaatacttactgttctttgttgcagctctgtgctcagcttaagtctttggaagatggaaagaggtttcattccattatcacttccaatggcatggcaattgatgaggttttgggggcaaaactagtctttatgtatgtgaattgtggtgatttgattaaagggagacgaatatttgatgggatcctcaatgataaggttttcctctgaaatcttttgatgtctgaatatgtgaagattggtaattacagggaaagtgtgggtctttttgagaaattgcagaagttgggaattagaggggattcttatacatttacttgtatcttgacgtgttttgctgcattggcaaaggtgagggagtgtaaaagggttcatgagtatgttttaaaactgggttttggttcttataatgatgtcgttaactctctaattgcagcttattttaaatctggtgaagctgagagtgcacgtattttttttttgatgaattgagtgacagagatgttgtttcctggaattccatgattagtgggtgtgttatgaatgggttttccagaaatggacttgagtttttcatccagatgctgaatttggggtttgatgtggattcggccaccgtggttaacgttcttgtggcttgtgcaaatattggcaaccttacattgggtagaactcttcatgcttatggagtgaaagttggtttcagtggggatgtcatgtttaacaacacattactagacatttattctgaatgtggtaatttaaatggtgcaaatgaagtttttgtgaagatgggtgaaacaactatagtttcttggacttcaatcatagatagctgctcatgttcgataaggtctacatgatgaggctattggattatttgacaatgcaaagcaaaggtcttaggccagatatttatgctgtcacaagtgttgttcatgcttagcaacatcttggataaaggaagggaggtacacaattacatgaaaaagaacaacatggggtcaagtttgcctgtttctaatgctctcatgaatatgtatgcaaaatgtggaagcatggaagaagctaatttaattttctttcaacttccactcaagaatattgtcttatggaatgcaatgattggaggttattcacaaaactcactccccaacgaaactccagagctgtttctggacatgcaaaaacagtcgaagcctgatgacattacaatggcttgtgcaggcttagcagctctggataaaggcagagagatacatgggcacatattgagaaaagggtacttttcagatttacatgtagcctgtgcacttgttgatatgtacgtgaaatgtgggttactagttcttgcatagcaactgtttgatatgattcctaaaaaggatatgattttgtggactgttatgatagctggatatggcatgcatgggtttggaaaggaagcaatatccacatttgaaaagatgaggattgcaggtattgagcctgaagagtcctccttcacttccatcctttatgcttgcactcattctggattactgagagagggatgaaaattctttgattccatgagaagtgaatgcaacacgagcccaagttagaacactatgtgtgtatggtggatctccttatccgctctggaaatctatccaggacgtacaagttcattgaaactatgccaattaaaccagatgctgcaatttgggatgccttgctttctggacgcgggatacatcatgatgtggagctagcagaaaaagtggcagagcatttttgagcttgagccagagaacacaaggtattatgttcttctagcaaatgtctatgcagaggccgaaaagtgggaagaagtgaaaaagttacaaagaaggataagtaaacgtggattgaaaaaggatcaaggctgtagtttgataaaggtccaaggaaagtttaatatctttgttgctggggatacttcacacccccaggccaaaaggatagactcattgctgagaaaattgcgaatgaaaatgaatagggaaggttactctaataagatgaggtgttcattgattaatgcagataataggcagaaggaagtgcttctacgtggacacagtgagaagttacccatggcttttggaatattaaatttgcctccagggaggactgttagagtaaccaagaatctaagagtatgtggggactgtcatgagatggggaagttcatgtccaagacaaccgggagggaaattttgttacgagattcaaaccggtttcaccatttcaaggatggtttatgttcttgcagaggtttctagtaaatcatcgatcggaaaaattcaatagaggggaagttctcccatgtcagtgtatcattcttctcttcgtgagaattgataattgcgtatttcaggatcacagttctcttattgatgtaggacgcattatagattaggatacaacgtcatggccaaaaagtgtatgttgaagtgatagccatagtgtgtagaatcagtgattgaggctaccgtttttgtagttacgtcagaggcaactttatgtcctaacttcgtctgtgaagtgatgttattcatggatgacttatctaaacatctatatttggattggaaaaacattgtagcagagatctataattggggttcagatgtaacattttttctctgaaatagattagtggcaggatgttatttatgatttgtgactgtgagtgatctcagtttgcttttagattccaactttttttttttattatttctgataatgttgaccaatcttgactcttgagaaggggataaaaatgagaatgaccacaaaaatgcttaaaaaatgagaaagtcagcgcagtgtgttgtgtttgtacccattttttgaattaggatgccacgccacatactaaacatgtaacgtgtttgaggtattttagattcaaattgctctccgttaagtatatgattcagctgaaacattacttattcacgtaatcacattcaatttgtttctctaccgttaaaggaatgtgaatcaaataacttcacttctcaaaagtcacaaatgtagtccttcaaaatcattttcatgggttaaaataataatggattatatcattcataagtctttacagtctactaattttaaaacgaaaagtaaagatttatagtcacaaataaaaattctgaagttgaaaccgtgatataatatacataatgtacaaagttatacgacctataaaatttgctttcttgatttttgcatcaagagttacaattatacatgataccatgccatcaaggtatatcattattcaaatattgatttcacccaagcttagccatacaacaataatggtagattgttactttgagcctgaggttctctacatggccatttatcttctcattttccctcaaacgttcttggactgctcaaacttgccaacttaggcttcagtgcaatattttccttgtagtacttcgtatggggctaattaatttgagcattccaaagtaaaccaagctgtaatatatttagctacttaatcagggtatgttggacatctcataccaaaccatccacaataaaatcagcatggacatcataattgtatcatagccagacatccacgaccatgcattattattccctacttaccaaatcatgtgatcaaccatgaccagctcaccgttgttcgtctcctatagatcaagttgtgccaataaataatggaatcactatattaccccatatatatagattagaaccagaaataaattaaatataacttcggcttttttttttctttcccaaatgaaacaatggtcaaacattatttttagggaaattacatagtacaagagatgcaaatagaaaagactataaaaaagtttccatttaaacaatataaactattaaattgaaaaattctttcacaggtttaatttagaagaaatttaaattagcagaaagctaagcctcataagaaacaaatggaatagtaggcactttcctgtgttttctttttggttggaagcacttttcttttaatacaacacaatttgcgaaccctaactttatgcctgagactcatagttcgttcggtggaatggaaagaaaaaaaaagaaaaaatttaaattggaaagaaaataaaaaaaaagaaaaattttaaatttttgtttttagaagtcaagttttcttttcattttccttttattttattttttcttttcaattttttttaatttttatctaccatatttctctcttttaaattaaatacatcaatactaattttataatttccaaaaaataatatttatcaacaaagtaatgtatattacaaaagtgtcctaatgttagaaaatgtattcctaaccctctcaaagtctatttgataaaaaaaaaaaaaattatagtgtgctactcaagtttactagaaattgtattcctaaccctctcaaaagtcaattggataaaaaataataatgaaagtgtggtactaaaggttaatttgagacaaagagcaacgacagtgtacatgtgctcctcaaagtttatttgagagaaaaagagtaatgaaagcgtggtgcaataatcaaaagtgtaattgaggctcgctgggtcagcaaaacggcgtattcaatgagaagtgtgagagaaataagaggttatagcacaagttaatcacatctttctgggtaccacatgatgctttctggataccatatgcatcatccatccccaccacctcttctcctcataaacattaatacacaactaattacaaaagtggcaaagaccatcatgataccttgtatataaatgattgcaccgaacaagaaattgattaaaaatagcaagtgaaacaaaactcgcacattaattttcccctcctgtttctatcgggtgccacattttggcaatctctcatttctttttcaatactcttcctcttcaccttcgaattcgtataataaataaatgaattaaacaaagaaccattttgaataaatgaccaaaattcctatattctaaattcagaaaagcgtaaatcaaatttttcctcagcgacagcacttggagcacagtattaggaaaacaacgagaaagacaatggaagaaagcgctattgccacaccaagaaccaccttgttgggcccatggtgatgctccttcatgtgacgggcactgccaccaccatcatcatcatcttcatcataatcataatccccatcactgccatcatccgcagaattagaacgcttcgaaggtggaggagacaccggcctcccaaacttatcacaaggagcaatctcaagcttcacgataaacttggaagacataacggaacggttataacacaagttcccattcccacccaccttcaacacctccaacttgtcgataaaacttgagttgaaaggcacaaccccgtgaaggaggttgttggcgaggttcaagtgtttgaggttcctcatttcggaaatgaacgtgggaatagtcccgttgagctggttggagctgagatccaagtgaagcaaaccgggtatggcagataacgaatcagggacgttgcccgagaacgaattgaaagccaaggagaggtttttgagggaaatcaagtctccaatggaagagggtatctcacccttgagtgcattggaagagaggtttaaaacttggagattttccaacatggtgatggaggggggtatgttgcctttaaggttgttgaaagagaggtcgaggtaggtgaggttgggggaatggaggtgtttggggagagagccggtgaggtgtgcgtgggagatgattagggtttggagggcggtgaagtgggagaggatgaggtagggtttgatggtgaggtaggacagggtgaggtgggtgaggtttttgaggcgggagagggaggcggcggagaggtgggggaggctgttgatggaggttagggagaggaggtggggagggaagtggatgggggaggagggagtgatggggcagttgaggaggtggagggtggagagggatttgagggctgtggaggagagggagtggtggatggaagtggaacagttggtgagttggagggaggtgaggtgtcggaagggtgtggaggtgtcgcagaggaaggaggtgggttgggagcatgggtctcttggggtggggatgttgagggattggagggctttcagttggtttgggtcgagagggagggatagtgagagggttgtggtggggaggaggaagaggagaatggtgatgaggcagggagggaggggtgatggtatcatggctcaactcaacggtcagaaaggcatgcaggagcaatagtgactagtgagtaggaagaagagtgatcgtagtgagaacagaaggagagggacttcttatatggacatcgtatttaaatgcatgccacctgtatcttaaattaattgatgattttgaaaaaaaaaaaaacttattaaatgtcatttgtaatagatttcacttcttattgtcaaatgtttgaacgtcattgatgaaaattatataggttttaaaaattgagggaaaatgtttataattttcttaaattttaagggaagtttgtgtgtatatatatatatatatatataattctttcaaatctcaaaaaaaatatgtgtaattttaatcttttttataagatatttaattaattttttttcattaaagttagttctaaaataatgtgacaattagaaaaacgtaatctattaatttgttaattttgtttacatggatagttaatttttttaaagataacaattgagtaaattatatgatttagttcttaactatataaccttgtttcaaactaccgattgcattttctagtagattaataacgatttattttcaaaaataaattttgatacatttgcaaattgttgtagtaattgaaattaatttcctaaaaaaatgttgcgtgggtgactgttgtcatgtcaatatcatttgttcatatgatatgttatattacatgtttatgtgaatgtcatgttatatcgcttaacaatttaaattaataataaaaattaaaacaaaataaacgaatttataagaaattaaaattgatcaaaatatattttaggaactaaaaattcatataaaatgagactcaaaaggttcattaaccctattaatctaacttgagctgaggtatttatgtcttccatttcattctttggtacaatggaaggaataatcaatactaatgtttacataaaaaaagtgaaaacttatccgtttaaaatattaatggtaccttacctgggaatgttttcttggggtcagaacttttcaactgaattagaatagtgcgagtgggatccagctcttccatggggttcctcagttccactactcttacattaattttatttcatttagctcgacctttgatggttctctctttaaccaatagccggaccttttattattttactaaattgataaatgataactagtctttattatcacgtcaacaatggtttggttttcagttcgacaacaaaaagaagaacaaaaacggggtaaaaggaagcaatgggggcgtgatgattattatatttcttctctttatcgatctctctccttttcaagattattttggcattttagtttccttgttcttacgttttatattataattaagttctttatttcttctatatattgtaattattatgtttttcttttgatatatcaaaagaaaaaacataataattacaatatattattttaagaaattaaccctttgaaactacgtcaattactgtctgacatccttttatttgaagtttttctgtatcttttatcttcgagcgtgtaacgagtgcatcagccatgaatggcggtgaaaaactttttccataactccatgattaatagagctagagtatgtggttaaggatacgagcacgtgcactttagaaaataaagtatatcaatacgatggctaaaatcatgtgtttagcaaacatgcatgcatgttgagagcaacaggtagcaatgtgactgctaaaattctctaacatgcgtttttgtgtgtacttgtgtcagcccaaaacaatagaactcgagctcatgaatattggactgaaccaacgattgatttggtgaaaagctatccaatggagcaaagaaaaaccaagataagtaataacaactcaatgaaaaatttaacaactttttatagtgtaatctcttgaatgtttgtgcttccatatccgagacattctcttcagatcaatctttctttcatagcccacttatataatgtgacagaattaaccaaaaggtatttaatgtgtcacttacaaaacatctaaattattacaaagaaatagtactagcatatttcaattataaggatttcactttatattgctttaacatgctactccactaagatgtgcacaccgataggcgtagtaattatacaattaagatttcataatgctcatctatatatttaatcagtctgttcgattatatcaaaatcaacttcgctatggccaaatttctattagctcaatctcagttgaaaagttgcaacaaagttttcaaacaacaagctaaaatattattaataatggactaagtctaactcaacttttaaaactaaattaaagaaagaggattatttgtgttttatgaggagtattatactatagttatttttgttatgcacgtgagaaatcttaacatatcaacgtcatgtttaaaattagataactagctagagtgaagtttgtaaaactcaattgggcctaacccttccatgctccatagcacctaataggcccaagggaactatatttgcagccccatccttttctctttaattgcacacccttcaattttttttttatgtaattgttttacaaaaatatccttttaagacattaattttcataatgtaatcatttttttttgacatattacgaaaagtagttttcattttttatgcaaccaaaactagttttcataatataataaaaataactacaatagtgaaaacagtttataaaagtaattaaaactaatttatgttaagccaatcatttaagctattaatcatattaaattaactttgtgagtaagtaaacaatatattgacaaatagacctattattcgattaaaaaatttaagaatttttttttgtgaacactattttttcagccttgagcttagacttaattctttaaaatattgaaatctgttcaacaagttgattctttcaacaaatattattttatacatatagacttgagattgaaccatttttgatcttatgtttaaggaacaaattaatttataagctaatcatatcatactatattaattaagaaattcagttgcaaaacaaatttagctaacgatttttttctctttaataaaaagaaaaataatacttaaaaaatgttaacagataaaatattttttttcacaggaagatataccttttagctagtagggtgttatttttcaataaatgggagaaaatgaaacacgtacgtaaatatgacgtgtaagaactttggacaatacttacctcctgtttaataagttgggaagttcatagcctgaaatttaaaggaaagaataattcatggaaaacccaataagtcaatgagtagcagcagctcatgtctacagttgtctgtgaaattcaagacccattttttctcttcaggataaatgaaatagagcaaaatccttaacatattttaattactcactcaatcttggatgatgtgtacaatccaatctttaaatgattcaaatatatctcatatttttttttcaaacatatattgtattaattcttatcatagataatactttaggatttaggagtaatgcaaaatgccttcaacattttctcaaatggaatattatattcaaaatgtatgcatttatgtttgggttaattatatttttaaatcttaaactattttaaaatttattttttaatttttttaaaaaaatttgatcaatcaatatcttttaatttttcattaaagttttagttcttgtgttgtttattgatgttgtcaaaatgttgatgcgaaatcaatttttttttattatatttttgtgacgattaaaaattatcaaaaatgcttgataaaactttaaaataaatatcaaatagttgccaacaatttttaacggccaaaaattactttttcctgattctcacgagtaataataaaaatcatgaagttcatacaagatcatacagagtccccaaatcaacataaataataaacaaaatcccttgaatcaacaaccttttctcttctcccctcctccaatttcacaattgtaactccttaattctaatttcttttttcgctttgttttccttgaccacgttctttctttccttgaactcgaggaggtgggctctgccattgctttgtttaatacttctacttaaggttaaagcaaaaatgaattaaaagtttttattgtttaagttatgacaaattcataatatatatgtaaaatgtactgcacaaacccttctttttgcaacactcaatatatatcaccaagtctgaaaaacaagtgatacaaatgaagggtttgtttaatacatatatattttgttaatttgtcataacctaaacaataaaaactcttaattcatttttgctttaatctccagaaagagttaaaataaataatggcacaaccctcctcaagttcagggaaagaaaagaacgtggccgaagataaaaataacgcgaaagaagaaattagaattaaggaggagctacaacttggaaacgtaggaatcgtgaaattgggagtgacacagaagaaaagagaaaatgttgttgatttaggaatttttattattatttgttgttgatttgagggttgtgtatgatattcatgattttcttagtatgagaaccaagagaaagtaattccggacagttaaaaattatttgaaattatttgatattcggtttgaaagttatatcaaatattttctaatgatttttaactgttaaaaaataaacaaccataaaatataataaaataataattaaattaacatcacaacatcatttaacaacaatagatgatatggactaaaatcttaacgaaaaaaaaagttaaaaaatcttgacaaatcaaattttatttaaaaacttaaaattaactttaaaaaaaaagttcaaggaataaaaatgtaactaatctttacatttctcagagtataattgtaaagggaaaacaaatacgcaaagcagaggaaagcataggcacatatgacaaataatagatttatttatattacaaattcacaatcccctcgtctgtcaccataaaagaatttgaccataaaacaaaaactgaaccaacaaacaaatgtggtgccatctcgagaaagaaattaaagaagaaattttagaatacatcgatggattggtacgagatgtcgtgctatgagcttctcatcaacctccacggagtgcccttttttgcttggtgaagaggtacgtggcacaatgcccttaggaaatgcactcagaaacaaactgttcttttttggagatgggttcaccttcttgtctaaaacaagctttctggcttttaaacacaagctaagtgaagcatgaacaggaacaacaaagtgttaggacgtgccatattaatgtcaactgcaacgagcaaatgaagcaattgggaaagagagagggaatgactctacgactatgggcattgagggcaagttattatatacttatatttgatgaatataataaataatattattgtgtattaaatacatatattattaatgtatgcatatctgtgtataatatttcataaataataaatgtttattaaatatgacttttcatgcatgtaaaatttataaatatatattaaaattttattattaaataaaatataaataatcaaaatcacacccatgtatgtatttatgtgtagttaacacatacaataatattatattatttgttaattatattaattaaatataatatatatttcatctgttccattataattattgtgtaagaaaaaaattatttcaaaataattgtcattttaatctttaatataacattaattactttttttatacttatgtcccttgtaatattagtaatggaaaaaaatgtataaatgaattaaagataatataaaattaaattttagaaaattactacttttttttatttgttgattaacttttcttgttttcttgttttgtgtaaaataacctaacaagtttattattttgaaacggatggagtagttaatattacatacacattcatatgtatttaatgtattaagtagtattagtgtatttatttaattaacatttaatattggcttgtgtccaatcaagaatttctttgtataaatatttaccatatctttttaaaattagattcttattaaaggaaattaattatatcatattcttatttgaaagaatgaaaataaatctaataaatcatgaacaattttctttttattttactaattgtaaattttctattaattgtgaataaggaagaggtgttggatttttctctaccaaaaagtacagnnnnnnnnnnnnnnnnnnnnnnnnnnnnnnnnnnnnnnnnnnnnnnnnnnnnnnnnnnnnnnnnnnnnnnnnnnnnnnnnnnnnnnnnnnnnnnnttgttaatatctcttttaagaattgatcttaaagaacatatattagataatatgttttattttgtttttagttatttaaatagaaatattaaattgttcagtaaagtattatttgattttagtcatgactcatgagtgttagagaatataatggtaatgttgtcatagtgatggaaacagcaaaaaatggactactaactgaatttcaattttttcaatggactgaataatctctatttttcacgttgataaattatatactcaggctaatggttacagattttccattcagctcacatggctacaccgttcaacaaagaactaacaaataataatccttgtataacgtgcacaagctgtggatgaagtcattatcccatgcacccttttggtaagcattcttgttgtgacttaacaatctatggcaatgcaggtctcggcgatggtttcactgtcaactgtattcacaaatggatttatcttgacccaaacaagagaaaagacagaggccaacaacactgaccagagaacaacaatggtcggcgtgcggttttggcgacccatgagacctttgaggaatggatagagatgaaaaatcacccagaaagcaaagaaaactttcccaaaaagggttccccaagactcataccctccattaagtgcatcagagaatccagcaacaacaccaaccatgttaacaatgataagagttgttggaggaatcaagagagtagtccactttactaagtaaagttccccaaactcactgtcctctgcagccttagcagtgacagtgaagttggtgtcaacaccagccaacatcttaagaagtccttggaacacggcaaacagatgggctgaaacacctccaataacccagaactgctcattacgccacaaatcttcgatactaacaccactccatcgcagctcgagcacactggttattataattgagaggaaaagtcctagaaagagaacacttgcaacttttgaaagctgtgtcaaattgtatagaacaacatgatgaaaggcattgatgattagtaaaactgttatagactggtctataagactataactatggttataaataattggtcaaactatttatttggtccatctaattgtctctttcaacttctactccttacatgaataaattgcaagttttagtcattaccgatgcacatataaagttttggtctctattactcaccccagagagcattttttgacagtgtaaaattgttacaaaaatttcttgcggtgataaactgtcacacaaaaactatgcagagaccaaaccttactgttttcttataaaaggactaaaacttaaaatggagacaactatagggatcacgtaaatagtttaacctaaataattttcttttgttttgcttactgtatttcaaaggacaattggtatccattcggattaagctgaattgataacaactctctctttaactatatatcctggaacaaaaagatgaggaaattaccgttggtatgataaattttcctgtgaggaggcaaattgcaggcagagaacagtaagcaatgagaggaagggatgtgaaagggtagacaatggtgtttatataagccattctttgtagccatttgagacggcctccagaaaatccataccagagggggcagtgcctacttaggaaaatttcaattgatccaagggcccatcgaaggacttggtgcaatctatcagacaagttgataggtgcagaccctttgaatgcaggcctcaagggcatgcagtaaattgacttccatcctcgacattgcatcttgaaccccgacaagatatcctcagtgactaaaccataaatccaaccaatctggaaagagaagatgatgttttaattaatcaaaaaagaaattgagttaaaaagtaaagactgtgcatctagaatgagattttaattggtacaagtacattaacaaaaatatcattggaagagagaataggaaacttagaacctgaaggactttgtacaaaaacatttgcattaaaggcaaacaacctcttttccccataaagtcttttcttcatatccacagctaattacatgaatggcctccttgatcagcatcgagggatctgcagattcaggaactcctccattctccattagtgttgattcaatgaaaacagtagacaagccaaaagttttttcaaagctcattttgtgaaataagcattgacctctcatgctcatcataatctgcaagaagaaaagaaaccagaagaatattgcatagaagattctgttatatgcttctctagaactgattgaaaaaagtaactgagcttactgtcaagttccttgagattaaaaatggcggcctcaagttcttccctctttgcatttctttgaaagtctgagacatcgttggtggacttctttgaggggaagcaacagcatgaagatcttggtaagctgggcatagaaggagggctataaccataaagtgcttgtctattgaaaacacatccagtccccacatatactggtccttggatgccatccagtcctttcatgttaacctgaaatgaacaattgaagtccatcaaacagggatgagggttggaaattacagagttgtgtccacaatttttacttcagggttgttaacagttactgcattgcatgcatgcaaatgcagtgtgtatttggtgaaatcattgcatataaggagatgtcgtttttctgtcgactctagataaaatcattgaatcgatgttaacttacatcaaagaaaactgtgttgcaattggcatatcaatcactgcgatcaataccataaaatctctgggggaactgcacataacacacatctctaccaacttctggatccatgagaaaacacattgcttcccgaacggccttgctgttattaacataatgatcacaatcaagattgagaatgaagggagcatttgtgagaactgcagacactctcacctgcataaatccatacaaacatcaagcataataaaatcttaatgaccttatacaaaatattagtgaactatctatacataccagtgcattttcagcaccagctttcttgtgatgttggtaacctggtcttttctctctggaaacataaaccagcctgggaagttcatttccttctatgtcacgggcaccagtgtgtccaagaaaaacctggaaatgggaaacataaattttgcttaaatacaagaacttgtaccaattattgattgctagaactaaactagtcaatcttactaacataaatgttttccattatatgaaaaaggaaacaattttttttcacacagaatgactcagtactttatacagtgttcttttctttatgcctatcattgtcaatactatagttgattacatacagaaataatggatatacctgaatcatgccagggtgatcacgtgagttatttcctggccaaggtgtaccatcttgcatggtccatccttcttctggtgttttctgagccttagctaccatggcattaactcgaactttatactcttcatagtctctctgtgacagaattgaaaggtaaatcaatcatgaagaggttgctctaagatactcaatttgggaaaacaaggtggtgaatactgttggaactattagttaatttagaattggaatatgtccaattgcacaagggtcagaatctgagtagtcaagaggaacaacataatttactacaactgtacaaaaacaatttaaatagaacctgtatgataagtatgaatcagaaacagatgcaaagagatgaaaggatccgagcccaacaatgttgtctccttaagacaatttgttccctccaattgatgccaaaggttaatgaacaattgtctcccaggatagaacggatcacgtctgaagattgatggcacttcaaatcaacagcccaaacgaacaaagacaatgcttgaggaaccacagagttatgtgatatgaaatgcactagtgtctaagcgagactatcagaaaagttaactatcagttttctacttccttcctttctccttccttttttctgactgtctctgtgtctatttannnnnnnnnnnnnnnnnnnnnnnnnnnnnnnnnnnnnnnnnnnnnnnnnnnnnnnnnnnnnnnnnnnnnnnnnnnnnnnnnnnnnnnnnnnnnnnnnnnnnnnnnnnnnnnnnnnnnnnnnnnnnnnnnnnnnnnnnnnnnnnnnnnnnnnnnnnnnnnnnnnnnnnnnnnnnnnnnnnnnnnnnnnnnnnnnnnnnnnnnnnnnnnnnnnnnnnnnnnnnnnnnnnnnnnnnnnnnnnnnnnnnnnnnnnnnnnnnnnnnnnnnnnnnnnnnnnnnnnnnnnnnnnnnnnnnnnnnnnnnnnnnnnnnnnnnnnnnnnnnnnnnnnnnnnnnnnnnnnnnnnnnnnnnnnnnnnnnnnnnnnnnnnnnnnnnnnnnnnnnnnnnnnnnnnnnnnnnnnnnnnnnnnnnnnnnnnnnnnnnnnnnnnnnnnnnnnnnnnnnnnnnnnnnnnnnnnnnnnnnnnnnnnnnnnnnnnnnnnnnnnnnnnnnnnnnnnnnnnnnnnnnnnnnnnnnnnnnnnnnnnnnnnnnnnnnnnnnnnnnnnnnnnnnnnnnnnnnnnnnnnnnnnnnnnnnnnnnnnnnnnnnnnnnnnnnnnnnnnnnnnnnnnnnnnnnnnnnnnnnnnnnnnnnnnnnnnnnnnnnnnnnnnnnnnnnnnnnnnnnnnnnnnnnnnnnnnnnnnnnnnnnnnnnnnnnnnnnnnnnnnnnnnnnnnnnnnnnnnnnnnnnnnnnnnnnnnnnnnnnnnnnnnnnnnnnnnnnnnnnnnnnnnnnnnnnnnnnnnnnnnnnnnnnnnnnnnnnnnnnnnnnnnnnnnnnnnnnnnnnnnnnnnnnnnnnnnnnnnnnnnnnnnnnnnnnnnnnnnnnnnnnnnnnnnnnnnnnnnnnnnnnncccattcctttcgacaaattttcaactaactctctaggaatccctttaattaatggatccgctatgttctctttagacctcacatagtctattgagatgattccattcgagagtagttgtctaacggtatcatgtctacgacgtatatgtctagacatgccgttatacaaaacattcttagccaagcacccccacactttcaagtatttcaaggatgattgctttcatttccatacttcgtatggtatgctttttgtcttcttgtgaggaactctattaataatatagtttgccatcaaaatggcttccctccacaagttctatggtaaaccggacgtgattaacatagcgttcatcatttcttttaatgtccgatttttcctttctgcaatcccatttgattgcggtgcataaggagcagtcctctaatgtataatcccagattctatacagaattcctcgaaggggccatcatattctcccctacgatcgctccttatagccttaattttcttgttaagttgattttcaacttcatttttatattgtctaaaagccacaagtgtttcatccttactattaagtaaataaacataacagtatctactgcaatcatcaataaaagtaataaaatatttcttattactcctagatgatacagatttcatatcacatatatcataaacagaaacactgattaatcacacagatcaaacagaaacactgattaatcacacaaatcaaacagaaacactgattaatcacacagatcaaatagaaacactgattaatcacacagatcaaacataaacattgattaatcacacagattaatcgttcaaagtacagagagtagacannnnnnnnnntaattcacaaagatagaatatactgaacccagattcaaagcaaattgtcttaagattgatggaactattagttaatttagaattggaatatgtccaattgcacaagggtcagaatctgagtagtcaagaggaacaacataatttactacaactgtacaaaaacaatttaaatagaacctgtatgataagtatgaatcagaaacagatgcaaagagatgaaaggatccgagcccaacaatgttgtctccttaagacaatttgttccctccaattgatgccaaaggttaatgaacaattgtctcccaggatagaacggatcacgtctgaagattgatggcacttcaaatcaacagcccaaacgaacaaagacaatgcttgaggaaccacagagttatgtgatatgaaatgcactagtgtctaagcgagactatcagaaaagttaactatcagttttctacttccttccttttttctgactgtctctgtgtctatttatagacaacaaacaaccctggtgaagagttgtcagtaaaccatcgcgactcttggcgatgaaccatcgcgactcttggcaataaaccatcgtaaccgttggttatcggagcggttgggagtagttatttttctaacctttcccaagagcggttataagtagttactattttgaattgttaaccgcctcttattcataactcatagagtttaaacaaaaactccaacaaatactagcaaatcagatacatctaactatcaaaactgttctatcactgaaatcataagtaggaagctttacagacttaccttcattgctctacgctccttcacgaaagaaggttgcaccttgtccttcaggaaatcaatcttctgagagaagtaaaactcaggtgctcttggttcaattgaaaacttcctgcaaaatggcacccacttccttgcaaagtcagcagtctccacaagagattcaaatgtgagcattgcagcaccatcatctgacacataacaggatactttatccactggatagtcaaccgcaaggatagaaagcactgtatttgctgtaatcaatggtggctctttcaaaggatccactgtactgacaaagaaatcaacagctgcaagttcattgggttcaccctctctttcaaacctggcatggtattatagaagtgcgcatcagcatccaaagcaaaggctcagtatcagctcttctaaatattactttattgtatggatttaattttgattaagagtaaaacttccactctccccgaataatatgttaccatatcatttaaagtatttgactcatcaggtaacagttatcaactcgttacagccaaaatcattcgatgatgtgacaacacatgatcatattcatcatgtagaactttttacacgggaagtaattaaggttaacatggaaaaattattttcattagttcatttttataggttgcctttcacaatttctattagggaaagaaatagaaacaaacatttccattctacagtatgatgttttagtgcaaatcatccttaaagcacaaagcaaaacacatccaagtatttcacaactttgtgcatttaccttgcagacagattgtcaataaacgtttgcctattgataggactccatttagggaactgatctagcacccaggaaaatacacaaaccagatctcacagatgatagaagtcaaccaaagaggaaaagcactttcaacagggtttgtaactcgataatggaagaaaagtcccaatattatcaatcgcatgattatcacagttctgtacggtgcaattttggattttgacattggaataactactgaaagtggtgcagcagcagaagcctctgcgggcctgcaaatcatatcaccatgtgaattatagaataaatatattaatttttatgatagattttcaataatgagaaatgtaacaagtcataaatacatgaaatatattcaaattaaatcaattgtctagcaggtgcaaaatcagatggttaataaaaatttgatgaatgatcctcaagcaattaataatatgctcaggtaaaaaaatagatttttaatatgtcaggggcttgagtttgttattgttctctatacagaggaagatttgataaaatatctggtaaaattacaatttcagtaccctgaagtgtaaagacaaaggtttgtgatctcatgtcatcagcttctgacagttgaaatagtaaaaagaatgcctttcattgattcttcgtctcacattagacggatgaaatattgaaatgtttatatttagatttcagcttataactatcagacaacattaccttggaaaatgtatgttttctcacaggatttgtaaattaataactttttgtttttgtctgattccattcatcaaaccaaacatctctaccctatcctcacataaacttatcattagagttatgcacaagtggcatataattctatagcttctcattgttaacctaattaaggaatcaaatttttttgttaaattttaaaaattgctttatgttaaatattacagtttattttccatctccgcaaattgttgtcatttctcattgagcttactgtgtttcttccatctgctgctctggaggaattcaggcctccttttcttccttggatgcagcctttttttcttgttctttttatcctttcccttccagctttccactctatttttccagattgattttccagattcctcatttacttctccagaaaaaaccattttgtaatgatcaatgcttacttctaaagatattgtagtagaaaatattgtctgaagtatcattcacttaccactatcgactgtggacactgtactgacatgtctagcatggagtccaacatcctacaaaattcaaggtgtgattataagtgcaaatgcaaattaacaacgtaagaatattacaaaaatttctgtttttcctcaaaattaaagctatttagtacttgtgcaactaataattcctagtaattatcacctgagagttactgatttcggaaggtgttgtggattgattttcatgaacctttatctcatggaaatcatcatcctcattttcgtgaacctttatctcatggaaatcctcctcctcctcctttcttctctctagaatttacaaaaggaaaaagaaaaagaaaacaaacttatgatgtttcaaaattcattgaacgagaaaataaaccactttttgaaataattttacatacacaatgttacatactttttctttaaaagatttatagataaattaaacaatgttacatacttttgttttcctctttctcacaaattaacactaatactctattactttgtcgaatgattcattaaatgcattagttttaattagcctcccaagatcaccagtctcaaataaccattgcatggagactgaaattgggagcataacaataacgtgagtcacaatccacgtagcaaacagaagcaaattataaattcttagttggaatttagaaataaaatgtagtagacattaaagggttaccttcatagggagtgccacacctcatgcagaccctatggtcctcattaatctcatgctcaaagcaatccttgcaaattgggatattgcattcatgacaagccacaaacacttccccatttgcattaagtcccacttgttccccacaagttttgcagaggggaacactagattgcaccatcttttagttttgcaccacctatcaaagggccaaaatgtcagtatatctctcagtgaccctttgcttctcaatcagtgctcatattggttttatatgaaaaagcataaacccgtatggggggtggagaaagcaattgtgtagcaatgcaatggatttgcatgttggaggtggtggtggtgggttctttttctgaggttggaaagttggtgtcatagtttaagtggcacacaacataagactatctgagtgatgagaagcaaagtctattttttcgttgaagtgtgcaatatatcaatttaatgtgggaagtgtaagggaggcttcagatgacagttgtgttggggtacatcagctgatgaagtgaacaatatgtcaattttggaagtacaaggagtaagtatactatttctaattgattcaatgtttacaaggaaaatattagtgacatactttttaatatcttcttttaaatattgttttcatcaattaaattttattaaaaattctaaattttgtaagttttatgttttgcttaattcaatatttctcttaattttatttttttaataaattttaatcaataaaaaaagaatacattggaaagtgtctcaaaatgaattattctcctactataagggatatctttgacataaaataatttaaattataattctaatcccttaattttttaaattcatgattttggtcccatgatttttagttataatatttggttctttaatttgataaattgatgattttgatcttcctaatagattattaacaaataattttaattaattgagttattaagttaattaaaaattattaaaactttaataaaaatattaatcataatcgtccacaacattgggcttctcagcttttctgcaaactcttcttccacctttaccgttgcatatgactccacatgatggagcacaatattaggattaataatattattaaagcttgttaataattaataattttatttaatttataattaatttaataactctattaatcataattattagttaataatccattagatgaaccaaaattattaatttataaaattaagggatcaaatattataattaaaaattatgagaatcaaaatcatgaatttgaaaaattagggatatcaaaattacaattttctctgtgaaataataaaaactagtttatttttgagcctatgctgcccgatttaattatctctgattttccaattttaaaggaataactttacatcacttggtttgtttgttgccagcaataaatatatttcaattcaatattgctagaacgttaggtcatgccatatatatatacatcgaatacgccatttctcctgcaaatcatgaaaatagaaatgatacgacacattatcctccgaaatattaaatatactaattaatatatttttaatgtgcagtatgattcctaaactaaaaaacgttaattcctatcattctcaataacacgattagatggcatccccatagtttgttatcattttaacactaagatcattataaaattgaagtaaattaaatataattagtgcataaaaactatagatgtaagaatttgtttacttcgacaaatgttcgtttttatttcctattttcatttttaatataaatacattattctattttattttttattaagtaaaaaattatataaaaaaccatgaaaatagtttttttactgttttttttatcaaaacatttaaaattaaaaaattaaagaagatttctataattaagaataaaatcatttttacaaaatcttttacaacacactacattggattcattttcattttggctctgtgtaattcagggtgttataatatcaagtattgataatagtgtatttttaatttgatattaaattattaattcagaatctaaaattgattttgaatatatttttacgtgtttaattttatgttaaagaagaatttattattgattctaaattgaaataactttgaataatttttgcacattagatacaaaattttactcttaacttattttataataaaatactcatacataaaccacatcacttcaaaatcaattttaatcaaaatcaattttatctatccaaacacacttataagagtgagttactttattcagtgttcactaacaattactcgaaaacgatcaacttaaacgtaaaaagaaatacatttgcacgaggactcttagcaagagaagcttcacttctaatttctagcatacattaaacatttacaaataatagctttgacagccaaaaattagaagatagcaagagatatctggaagagcgaggcgagataacatagacgaatggaaaagtgcaagtaaacacacatggcatgaatcacaccatcaccatgtaaatgaataattataggtcatcattgaacagttcctgtaggcaatgaatcagggagagaatcgcaaggcaacctaggcaggtatatctaggctaaaagccttgggccattagcacctttcctgtcaggaacacgatcttcagagcaagtgcaacattacagtttcaaacagtcattttaggttttgtttgctctccaggaatactcattccaagaatcactgtcatctagctttaaactatgttatagtgtagacctttactactttagatgtgtcacacacaacaaggttgtctgtatcagctgaggtggtacacagccaattgacctgccaaataaagagtacaaacgaatgcatcagacatatttggcagaagcagaataattaaccaacatccaaaagttccaattaaattaacttttattacaaaactcacttttcgaggtacttcaatgttcaaatgcaggatattattgttgttgtcgtcgtcacttaacccagcatctgaataacgggaccaattccataccttcaccaacttatcatttcctccagatatcaagaatttccctctttccccaaacaatgaaaatgccctgtgtcacccacgagttaggggacaagtgagtttagtgttacagttgctatattgcagtcacagataatgaattgacttacaggctggaaacagctgcagtgtggccacccaaagtgtaatccaaatgcaacctcttttttccattttgatctgcgtctgtattgctagatgaactaccatcttttgatcttgagtgtgatccttttcgtgaatttgaagagctttttgattttgtagcagccatttctgtttcgatattaatcacatcaattgctccatcaccccttgcaacagcacatattttgtctaatttatctagcatgtcgacttctggaacagctattgcatgaacaaaagcaggattgacacaccggccagcaatgccactactcacatcaaatgtagctgcagcgaagaaagggaaggatcaacagtttagtagttttacttttacatgtttattaaattgagggcgagccctaacatagtgctaaattgtgccttgatgacttgttggtcatgaatttgaatctgaaaacagcctctttacatatgcaaaggtaaggttgcatacaatatctttctctcttactttcgcatagcaaggagcctctgggtaatggggtactttttttttttatcagcaaagataatatatatatatatatatatatatatgagggcgagccctggcacaacggtaaagttgtgtcttggtgacctgttggtcatgggttcgaatccggaaacagcctctttgcatatgcaaggggtaaggctgcgtacaatatccctcccccttacctgcgcatagcgtggagcctccgggcaatggggttacgtggcttttatatatatatatatatatatatatatatatatatatataaatgataaagatgagtacaagtagtactgaaaaaaagaaaaaacaccccagggagccaaccggaactttggcaacctaatacatgatgacaacccgcattaagatgccaaaggtcaacctaaggttaagctcacatgaaggttagaaaaactagacaaaaaactttctagcaaaatccatctctcatctgactagaccaatgatagaaggggatattaaatcctttctccaaattgactaaccaagaccaacaaaaaaataaggcatcctccaacagcttagatccattgaagttttcgttatggatctcaattgtatattactcttatcatttttaagagtatgtatgtttgcataagtaaataaacgaaaatgccaccatgtaaaatatagttgcaagtttcaactgtgaaactataaaaacaaaattagcacaaggatcattaatttacattgcactaagtaccagctgttagttcagttattatctaagctgaggcatgtatgcctcgtgacatgcatacatatatcgaaaacttccaggcttcagtgacaacattttcatgttttggataataactgcttgtgacttgcattctccattgtcaatagtcaccaaccatcattttcatgttttatttcatcggtaaaatatttttaagtggccaaaccttttgtttttatctactgtggaatcatggccaaggatgactatggttgcaaaagctttcgaacataattaaaaacaatcattatcctctaagttctcttttgctgaatgcattcaaaaaaagccgtagagaagtgaggacttaatatcattgcaaatgtcaaattaaaaaaaaaaaaaatcaaagaaggctctaatttagatcattcaagtaatctcatgcaaaacttagcaaaggcaaagtaagaaatttaagaaaaattataccaaaatccactactttgtaggggcgccctttggagaagtcccacaacatgagcatggaatcaagacctccactaatgactggtaaaaaataaaaaataaaatggagtcaactttctatagatatgggtgcaagtttcttgaatactagcatgaaacttagacaaacaaatggagctgttattgtaaaaccttataccacaaggttccaaaatttcatttcaaatagaatcttgtgcttgtacaaattcttttgattgttctatccaactcatatttttgttataactttcctaaatatattttttcatactttaaaaccaccagtagtttacatctattgtgtatgcatgactgttataatgttactattattgggggcacaaattaagttgtttggggtgaaacaatggcacaaaatttatcagaaatggaaatcagaaaattaataacatttagaagggagtccaaatcaaacaaaaagttaatttgccgaagtcaatggttataacacagatatagaaaccctcataagattactactctataaatcagagttgaaacaatctgaactcaagaagaaaatgttgcagtaaccagctatgtcagtttctttcttgatttagcttttttagtaacatttatatatattggaaaagtaaacatatcacccaatatgtgtctgtgcatgagcacatttgcactagctcaatggcttctcgacatatattattcacagtacttcctaggaattccaatttagaaacaaccagttatcataggactaggactagagcatgctcaggtactattgtcaagcagttcagtgtctcatgtgcttaatagagtgagagagttagaatacacagatttttggtctttgaccaaaatatccatacaagcattattatgagactaaagcacctcaggcaatgtcatgagccatgattgagaccctcccaacaatttccttcttcatgattagttagcatgtagagtttgattaaaaaattctgcattcctttccaataagacaatgggtattctaacatacaaggacaactcacatatttactctagacataacagtcatatctttttctcattggaaaccattaattgcactatgatgaggaggagagacagagagattcatatgtgaaaaataagcaagactatatgtaaataccttcccaggttctccaaggaaggaattccacagtgctacatatctacaacactaggttaaggtaaattatcaaaaaatcaaattacttattaatcacaggaaaaaaataataccagaaaaaattgggggaggggggtggaaaataaaatattagtgggttgagataaaacttctgattacataattagcatccatgtagtgaagaagagctaaaaagcaaggatacacttgtatgaccggctcgtagtgttttatacaggcattgctgacgaatgtcaattatctgtaaaagaaattttaattataatgaggaaaatgaaaatgtacgatacttaaccattaacttggcttttcttaaattaaagaaatggtagatttaaaagtgtacactaaacaacgaatagtaaattacattacacaagaaacgacgtcagtttttaaattatcaattacaacacagtatatttccatgttttatggcatgtatcaaatcttttagaataggagataatgacttttatatctctaatgcattacaagtggaaaggatatattcattagagctgataaatgagataatactaaggaaatcagaataagcattgttgtataaatacaaggcataccttcacctcaccattatcatctgctgcagcaagaaatgaggactttgagttgcatacaacctgcaaaaccagacagataattgtattataacagcatttttaaacaaaagaagctcacctaggatagcatcagttgataacttgatattccaacagaatgaagaaatgcaaagcagctataagttcaggaatagttctgtaatctagtttaataatttcaatatcttgtgcaggtgaagaaagccatacactgcaattgttggaaagtcgccttaattgcgatcacccctggcccaacttagttatggcttctttgggctgccttaattgcaaagttgaagggggggtgtttagttccacattgactagagatatggcttaaatagatcttataaggcttgtggggttgagtcaggccctaagccaaaattccaagagcaatcatacttacaattctgttttataccactaaacacaaaacagattccatataaaagtcttgtacaaaaacagttaagatgacaacaaaaatcatacatacgatttctgatctacatctgcatggataatgttaagtacagtcaacaaatttgcttcaatttactttatataacaagaagcagttgggacattcaacaagatctggtaagtgcataacatttatttgaatacaagtcctactatctagcatctaccttgtttatctcttctttgttataattataattctccaatggcttccattgggcggcagccttcagcacacaacataatacacagaggatcagtataatgcaataaattaaggtggagcaagagaataaatcaagaacaacgtatatccatatatcctcaagaagaaaataaatagtgcaataaatgcttaccaatcgcacatcaaaacacttgatttcctttcctgaggagacataaaccatatcttccatccctgattcaaatggcaattatttgtaaaagatgcaagtaaactcatctactggatgtatcgatagaaaatttcattgtagttgggatgtgtttgatttttcaaaaacacttgtcccatgttgatacaaaaaaaggctataacgaacccttccgccatttacatcaaaataacaagtcgaaaaccaatattataataaataaaacagacctgacttgaaacaaagggaggaaactggctccacgctaacatccatcaccagtctcggctcatcagggcatcgcaagtcaaaccagcaaacacgaccatcctgttttgtttcagaatcacaaccaaacagttaaaactataaatttataggagatgaatcctgaaccctagtgattggaaagagataagaagagtatggaaattggagaaggagctgacatcgccggaagtgacgatgagatgagagcgttcacgtgaggcaatgcagcaggttgtgctgtcgtcgtgacccttgagtcttcgatgcttcagcttaagcttcgtcgcatccttctcagccatcgatgatgccgtttcctcgaaacctaaattggttcaggtgtgtgtgtgtgtgtgtgtgagattatataacatgtaatggattaattgattgcacgaaacgcagaccctatttggttgctgcggtgatgattgggaattatggagtcaccgaaccgaacttgctgcggtgaaatgaaatgaaaccgcgcggcaaagcctcactcactcacaccaggtgcccggaattaattctctttgatatgctatttatgtgttcgtcgaatgtcaccactgaacccgactttcgtgacacactatggcccttatttttcaaaaatatttttctcacgccccagagtgttagatcattagattagatgagtctccttaaacatgcttgggagttggaattagatactttgatgttctgttagatttgatttgcttcactttctttcttcttttttcatactatataaaaagtaataaaatagaaaaaaaaatcttaatataatccaagaagacgttaatgacaatgttgaggacttgaggttgttagcaaagacttatttaaaagattataacaaatggttctatccaattacttaaaagattataaacaatcctcgatcagataggaaatgtattattcatatatttccagattaaatattaaattgttttaacaaaatttaaagatcaattatgctttgaaaactttagacatccataatgtaagatataataaatggacttttttatcattagaattatttatttgaattttaaaattaaatttctttttacctgtttcaaattcaaattctctgagattattaaggtcactttgtgagaaatattattcactatgatgtttgatagctcattttagttttatcctcatttatcttttttttctatcagaatcattcaccacatctcctatatccttttccttcctttcattctttatctctattttaactactcaaaattttcttttcataatatatatacttaagagacacacacacacacacacacatatatatatatatatatatatatatatatatatattaaactgataaacataagttagtgccactggatttgagtgacaccgtacaaagagacagcaacactacgttatacttgcggctcttgttctttggtttcttcaacttcttgagcgaacttagtagcgccaatattctgcatcatatctttgcttttgccccacagtagcatgtacaacccgatcatcaccaacatggatcccaccacactataaaattaacaagcacaagcatatattaaactttggtttttaatttacttcttttttccaagaattaatgtgctatagtcctaggtacaagaattaattcaccttccaagatgaagctgctcgtgtaagaaggggatatcaatcatgccggacattatctgaacaagagggctgaatgcagcggtaaagaccggacccctcttctttacgcaccatgacatgcccacatagcacacacttgacccaactatcccctaaaaacatatataatagtatttcactttgttaacatgctttttttttatatatattattggtagaagtcgaaaacaatagtattagaacgtttatcataattcatatatccaactcaattaattgaattagactctttcaacatatattcttaattatattctatttacaaattgtgaacaataatattgtattttttttataaattcttttgcaatttttgttgttgttgagaaatataatttttttctcctagttaaaaaataagtatataataaaaaatattatcttgaaaatataaaatgtatttaatacatcatatattagtataaaagaaataagagaatattagaggatttggaattattcaataataaaatatcatacttttcaaaatcgaccacatgtgtgaacggttcatggtctaactaaattacctaatgaaaaaaataaagaaattaaaacggtgaaaacctgagaaagaagactagtaaaaatcaaccaataatcaatttacaacatattagtaaaaaaaatctgaatacgtacaacatggttttgtttttcttataaaaaaaaatcaacctaattatttttataagccaaaataatttgaaagagtgtacttactgaataaagaacggtgattatttgtatcttatccttgagaacccacgaggacaagttgctgctgccagtggagaaaccaagaatagctgcttgcatggctccaaagaaggtcatgatggctgtgctagaatactggcaaggatatctcttccctatctttgactgtaaaataaaccaaaaagaccaaaaaagggttcccataatcaaagctattacaccaatagtccatttctgtgttgttctagtagtagaagaagcttggtccattgcagatctcatggctactgcagattgatagtgagagccatcaaacaagggctttcctttgtaaagtgtcaacaacaatgcccctcctatgcacacaaatgtaccaagaatcttcgctttcccacctttgcatttaatgttcacagtttctaatctgtagtggaatcaaaagaaaaagggaaaggatatggtgcatttatatatattctccatttgaatgatgatagtcgctataagaataagaatatgaataaaataagttttgtgtaaatatatattcttttcatacccaaatggtaatgccaaaatgaatgtgatcaccgggaccatattaacaaaggcacaagcaaaggtagctgaggtgtattggatccccagaaggaagaagtattgtgttacggatgccctacaaagaaattaattattcaatattacgtgttttttctactatcatgcatgttaaccatgcataaagaactatatcaggaattggaaacacataaagaaagatcgttatttcatgactaacccaataatggcactgaagaaaaggtagcataaaaattgaaatgtgagccgtggtcttccatttctgcaagaaaatacagttattaagatctttcaaagtttccttctggcataaattaatgagcccatttgagcactcatcctggatagcaatatatgattattagcttaacatatatccttgattctaaagagaattacgttcaagtgggtgatttcatagtcattcattattgcaacttggttatctgcatgctaacaataatataaaaaaataatccaaaaggtaaaatgccatacatgaaggagaaataggctatagtttttaatatcacgttaaatttcatcttaaaatcatcaattaagtaatatatatatatatatatatatatatatataaagatcaccaaaataattgagatagacaatgtagaattttttttcaacaatgtctaaaagagattatagtctctcataattggttggaaatactcttgattcacacaaaatataaagaaaggaattgagggtgcctatatacctttccttaaagtagccgatggggaccaaaaatatagtagcaactgacagacgatatgtgataaaaaccaaatggttcattcctttttgaaggactttcttaagcagaatgttcaccatggttaaagaaaaatctatcgatatcattactaggaaaggtttccattcatcaaaattcttcatttcagcaatgcagttttgtttctgggctgagtggcgcctccctctatctttctatttttcagaaaatgttcaaatgcttgcaatacaacagaaggctacctgtggctttatatatattattccagaataagtggtaagaaagcaacattactgttccaaatcagacactttataaacaactatcccttttgatggtagtttaacgtttgtgtagactatgctcttccacatgtgatctttggactgatatctgatcctgttctacagaaggagatcactatttgggaatcgtttaaaaagattttaggttggttcatgaatcatggtcctgatgtaaacattattggttaattaatttaggccactggtttcatattaacaattcatttagacccgaaacaggtaatgttcttcatgttttgttcccgttcttgtaccctttggcatttgaactttttttcaatgagtgacaagcatcttttaaatggaactgtggcagaagcatggcatctaatgctttttatctatcttccacatcaaaaacattgaaaacttgaataaaatgtcacatctcgtagctatttagtcacttcaaaatcttggtgaaaaagaagcacgcaaagaagagatcacagtgacgcaaaccaccagaaactttaatttgcaaaagaggtagatcagcatatgccctggaacttggagttcgcatacattcggattcaaatgtcatgttggtggtgcgaatcatgggtggctttcagtacttgattttaatatgaaaagccattattagataactttaactccaattacaacgttcaaattcttctctttacaaaaaataattaggattcaattttgatacctcaaaactttttatattagagttaaatggaaaatcaatttaaatctctagtgcattgcaaattatggaactgatcgaatctttgactaattggaagtccccacattcatttttagaagaggggggaaacagatattgaaatgttgttagaagtgtgggataatcaatttgcccttatttattaatgttgcaagaagttacatctaccactattaaatgaaggattttgtgaagagaagaaaaactatcctaacccaaagaacaaatcatgtatccaagaaaaaaagagttaaaatatatctatcacctcaaataattattcaaattttgtgtttattttctaataaattatttttttgtttttgattcccataaaataaaaaattcgtttcttgctcttgacattttttaatctaccataaatagtaaattttatatttattttttgataaaaaaattatttattattagtatctttgaaaaatattaataacaaattaatgaaaaatttatcaaaaatcaaatacaaaatttgttaatttattatgagttaaaaaaagtatcaagtataaaaaataattagttttattaaaactctatgaggaaatatttttataaaaataattaacataaaattcaaatacttattaaagttcacaaatatattttttaaaaaaaatatgtaatttcaaaagatattaaagagtttccctcctccatgcttcttaggcttcaacatccaatctaactacgtacatacattacctctggccccttcaacgagaccacgtattcaatgcccactccatgctcgtcacctccttccactacaatcgcaaccatgccttcatcattgtttatagccatgatgactcttgcaagatttcttcactaggagttctgatggcatccctcggttgcggttgatcttaacatgttaccacctaacaataatgacaacctttcgacaatgaagggtttaatatttgttatcagtttagaaagttttacactgtctattaataagaaattattattaatatgatttttaagattatatttaaagttaacatacttattataaatgaatgtgatttgtgattgaatgttaatataaatgaaagactggaatctaataaagtcatgtaattacaaatacaataatttatagccttcaaaatagtaatagtagattttaaaaaactattaaaaagaaaaatatgtgatactcaaatagtttgtcttcttttatagtgactcactggactttaaaaagaataaaacatttaacgtacatgtgctttcctttgaaggtaaatgatgggatgcaacttggattctcatcacatatctagaatccaacatgcaaaatatgttgtccattagccgaagattatgtggccactgtccttcaaaatgcccacccttcaactatttccgatttcctaccagatcttatcgtatctcaccaatgccagtgaatgaatgaagcttgatccgttaaataactttgaggatttaaattgcatgtgatcattttcaagctaggaggttctcatgagctaaatgacttgtcggacatgaaatttgcgtaaaactaggaatttctgctttggaacatctattaaagcagacatctaggcatctcagtactgaaattccttatttagaccatatcaaatgcaggacatatcatctatatctatcttactatttgagaatgtttgcattttactatatttactctgttcttcattgattttttccacgtttttttggttaatattgtcttgtgctataaatatattaaatagggtcgtattttatttgtttatagatatctttgtaatgtatacataagttttttagtcatcataatattaatattaacgtagagtagtgactaattttactaataattaagaaaaattttattacttatttttagttatatctaaatgtatgctgaaaatagaccgtataacaataggttttaaaaatatatttttatttgtattaataattaaatgttaattaacatgtgcaaattatgttatatattcttttgttcgaacttcgaatgattttttttattgtccctttgtttgttattcattttcgtcactttgttttattaacttttttatggaacatttatttattaattaaaagcattactttagtctttagagtctagatagagatttactttagatgtgatgcgctcaaaaaagattatagcgataagttatagatataaccttattannnnnnnnnnnnnnnnnnnnnnnnnnnnnnnnnnnnnnnnnnnnnnnnnnnnnnnnnnnnnnnnnnnnnnnnnnnnnnnnnnnnnnnnnnnnnnnnnnnnnnnnnnnnnnnnnnnnnnnnnnnnnnnnnnnnnnnnnnnnnnnnnnnnnnnnnnnnnnnnnnnnnnnnnnnnnnnnnnnnnnnnnnnnnnnnnnnnnnnnnnnnnnnnnnnnnnnnnnnnnnnnnnnnnnnnnnnnnnnnnnnnnnnnnnnnnnnnnnnnnnnnnnnnnnnnnnnnnnnnnnnnnnnnnnnnnnnnnnnnnnnnnnnnnnnnnnnnnnnnnnnnnnnnnnnnnnnnnnnnnnnnnnnnnnnnnnnnnnnnnnnnnnnnnnnnnnnnnnnnnnnnnnnnnnnnnnnnnnnnnnnnnnnnnnnnnnnnnnnnnnnnnnnnnnnnnnnnnnnnnnnnnnnnnnnnnnnnnnnnnnnnnnnnnnnnnnnnnnnnnnnnnnnnnnnnnnnnnnnnnnnnnnnnnnnnnnnnnnnnnnnnnnnnnnnnnnnnnnnnnnnnnnnnnnnnnnnnnnnnnnnnnnnnnnnnnnnnnnnnnnnnnnnnnnnnnnnnnnnnnnnnnnnnnnnnnnnnnnnnnnnnnnnnnnnnnnnnnnnnnnnnnnnnnnnnnnnnnnnnnnnnnnnnnnnnnnnnnnnnnnnnnnnnnnnnnnnnnnnnnnnnnnnnnnnnnnnnnnnnnnnnnnnnnnnnnnnnnnnnnnnnnnnnnnnnnnnnnnnnnnnnnnnnnnnnnnnnnnnnnnnnnnnnnnnnnnnnnnnnnnnnnnnnnnnnnnnnnnnnnnnnnnnnnnnnnnnnnnnnnnnnnnnnnnnnnnnnnnnnnnnnnnnnnnnnnnnnnnnnnnnnnnnnnnnnnnnnnnnnnnnnnnnnnnnnnnnnnnnnnnnnnnnnnnnnnnnnnnnnnnnnnnnnnnnnnnnnnnnnnnnnnnnnnnnnnnnnnnnnnnnnnnnnnnnnnnnnnnnnnnnnnnnnnnnnnnnnnnnnnnnnnnnnnnnnnnnnnnnnnnnnnnnnnnnnnnnnnnnnnnnnnnnnnnnnnnnnnnnnnnnnnnnnnnnnnnnnnnnnnnnnnnnnnnnnnnnnnnnnnnnnnnnnnnnnnnnnnnnnnnnnnnnnnnnnnnnnnnnnnnnnnnnnnnnnnnnnnnnnnnnnnnnnnnnnnnnnnnnnnnnnnnnnnnnnnnnnnnnnnnnnnnnnnnnnnnnnnnnnnnnnnnnnnnnnnnnnnnnnnnnaaaaaattaacagtatatgtacctctaaaatatgtgaaaattagactatttgattacattctaaatgatttcgaatttttgtgaaatttgagacatgtgatttacatgatataagcttttaatctaacggtggattttataaaatacttatccaataaaaaattattaaatagtataaaactatcaattcttacaccgatgtaaaaggatctcatctcatatatatatatatatatatcataggaagggaataaactcaacattttacttccctcgttaaagaaaattgatgaaataattaagtacaccaggactgtctactataaaatcaatttaaaagaacaattggtggactaatagtattaagaattagactaattaaagatttaaagatataagattagttgaatgtttaagagagaagaaaaaaggaaatagatggtgggtttgatctcctctgttaacaaagattaatattctagcaaactaatatttgctgataaaagaaactaattaaaatttatttgattgactcgtttacaccactcaaacaaggtcagaggaaacttagagcagaggatcccaatagagccaaactcaaagcacgcagcattgttgctcaactgcattgcatgtccaccacattgctgggccacttctgatgctagttgatggcatgatctgagtatgtcatatcaataatggactgagtgaccccagaaagtggccatacatgtagaagaaatggctgcacctgtaggggcaaacaagctaatttcatgaacctgatcacaaatctgtgtcgtaggccaggaccatatcatatgcgattatttcattggaccaatttacaattgaagttggtgggagttagcaatgttgttgtgagctcactccaacaaatagtaattattaatgttattgcatgtgagggaaacttcaaattcaatttcatgaaatctctttactcatcaaatagttcggccttgagtgcatcaagaggcaagatgtccatatgcaccagcacctggaccatcttcacacacatcttcaaatgaaaagggcttcatgatacgtggcatgtgattggaaccaccaccacacatgaaaatgttgtggcaattcaaaattgggaccatcattgactgcaacaacgttttcccaatctgcaactcttcccctgctaaatcttttgagcatgccaaaagtgcaatacatacacatcaacacaggatatataagtcttcacaaatttacaattttaacaatatttttttttacaactagtcaattttatcaattcaaatgttaacttatgtgactctatgatgaattgatgatgctcatacgtaataaatttttaaataatttttatatttgtaaatgcataatttaacattaaaaaaattctaatgacttaaataatattattaagccttgaaacagagtaacaaactgaattttaaatagtaacaaatgtccaagtgaaacttgattggtttctaagcatgagtaagaggaaaggctcgattaaaagtgaataaccagatttttttggcagaaattagtcaataatatcaatgacatagttataagaaaagttaaatatgaaatatgctttgaattaaatgaaattttgttaaaattataaaacatacatttagtagtgttgacgaatcaagttcatatacgtttgtgcaaatacaaccaatttacaaaatgaaaaattggcattattacgtcatgtaataatttaatttaaaacatattgtatcaatnnnnnnnnnnnnnnnnnnnnnnnnnnnnnnnnnnnnnnnnnnnnnnnnnnnnnnnnnnnnnnnnnnnnnnnnnnnnnnnnnnnnnnnnnnnnnnnnnnnnnnnnnnnnnnnnnnnnnnnnnnnnnnnnnnnnnnnnnnnnnnnnnnnnnnnnnnnnnnnnnnnnnnnnnnnnnnnnnnnnnnnnnnnnnnnnnnnnnnnnnnnnnnnnnnnnnnnnnnnnnnnnnnnnnnnnnnnnnnnnnnnnnnnnnnnnnnnnnnnnnnnnnnnnnnnnnnnnnnnnnnnnnnnnnnnnnnnnnnnnnnnnnnnnnnnnnnnnnnnnnnnnnnnnnnnnnnnnnnnnnnnnnnnnnnnnnnnnnnnnnnnnnnnnnnnnnnnnnnnnnnnnttagaatttatttttacattaagatgtcagattcttaaatatcaactttaattactatgaaattttatttatcaaatatgaaatgtttatgctttgaaatttactcttttcaatttttttaaattcttttttctccctaaatttaaaaataattaattacttaatttaatttccactactgaaattaatgaaccagtgaaaaaaataaaaacagcaaaaatattttcagaaaaatataattgactttctctactaatttcaatttttttaatagttttaaaaaatatctacacaatacttgagttacttattaacataaattataggnnnnnnnnnntttatgacatgttatttaataaaatcatccaacacctaaatcaattatatttttaagattagaactcaagattatttatcaatatagataatttcgtatcaattggatttatgtgcttgatgatgcaaattatacatatcaattccttaaaaaaggtgataggcacatgcataaaggatcaaatttggtaaggataaatagtcattttcatttctggatgtgtagaacgttgataaatttgtttctaaaatatgaaaattcaaattttagtcctcaaaagtgaaaaaaaaaatgtgaaaaattcattcactcgttaacttctgtatgctactgttaataaaagaacttacgtgacacatagggacaaaaatgattgttaacatgattgcttggaaataataaacataatattgattaataagcataatctgtctgctactctaaaatttctaatgtaacaatatcttatccacaatataatacttaaacaaaaatgcatagtcattaagttaatccttacaaaaaatgagacttaacttgattttgtcattatctaatactatcacaatagaaatttcaaagcaacacacaaaactctatcattcatacaaaattcagagcttggagggcttatgtaccgtacagtccgaaaaactcgacacgtactcggctcgtggggcccccacatgctcatctcgtggcagtctcaactgtcacctatgaactcgaccgtgttgcatagaggagcaactcaccaacgtggctccgaacatcgcataactatctcgacaacaaagatatatatattcatccagagggaaaatcctgaggtacattttcattgatctcacacataaaaaccttagagcaccattgacttgttcatcggagttccttttacatgtacctacatttgtagttatatgactgacttgatggtaaagagagaaaagaggaggagagatcatgaattcaaatacttcactaacaaaaaattaataattaatattgactaataaaataaaaaaattcaaatcatatttttagaacatcataatattgatgtaaaatatttatcggctagtttcaataatgattaattttagttgaaaaatttaacttatcatctttaatgagatatctctttctaattacattttttttcatttccaatattccaaactttataccttaaaaaaagagaatttttaccactggatccaagacaatagaaatcatcataccacctcacaactgagaaaagcaacatattgaagtcaaaccgggttaagagatcaacttgcttatattatcattaaaaaactaagcaaaggccaaaatttcctcattaattagagacacttgcacctcttctaataatctgcagaaagcgtacaaatggcactaaggaaaaacaaaacattgggaaagaaagattgataaacacttatttgaactgaagttttaaccatgtttaaaaattcatcaagatcttcagctcttttctttagtactcctccactacagaagttgggaactttgtttgccatgttctttgactgtatccagaaggaaccttggcttgatcgatcagtctccttttcaatgtttcctacacattaagcaacgtaccgagtcaaccaaataccttacaatggtcaatgagcaatcaacaacaacctggaactgatcctcacatcaaaccacagcaaccaatactgctgcagcgttgacacgaattccgctctgcataaagcaattaacaattaaagaacaaacattatttcactgtgcaacagcaattacagctagaatacaacacttttaaaagcctcaactacagttcccgcttcaacggctttgctgtacgtcgtttcatcaccgccgctagcgacaatccccgctcctcctgttcatgtggtttcgcttccaccgccaacagcgacagccacctcatacctatcgtaacttgaaggcgttgttgttccaatccaaaaaagtttatctttccttgcttacaaggagatgtagtagctatggcacgtcctagagagtgatgattacttggagcggaagccgaaaaaaagtatcggcagcaatgaaactcctgcttctccagattgagattgccattctcaaactaacctaaatagaaatatatcataagggaagaatgaatgaataagttagtgttgtttacacatataaatgctacgaacaaggccttcccaaaaaaaaagttagattattttggctgttgtggttaagtaatgttcaccaaattatttcaagctaattttttttatcagttaaaaaacttatttgaacatatatcttttagtgtttttaaatattacttgaagtaaagtttttagtatcttttagtttttaattttttatatttttttcaatttttatcttttatatttatctaacttcctagatattttatttaaataaatcatgattttatgattgatctatcattttagacttttaagttattttaaaagttaattttattaaacacttataattaaataaactatttttttttttaattttcaaccattactaacttccaactttctaactttcagttagttttataagtaaccttgtatttacattttacactttatctgtctactaaataaattctcttttcatgtaatttttatttttaccttttttatttcttttaattttaaaaaataatcctaaaattattgaaatgtaatcaaaaatatttttaaatatatctagaaataatattcctaattatccttaaaatatgattcctaagaatatcatatcattctatgaaacaaatgtccttacttccacttttttttttcannnnnnnnnactttattaaaaacatgtttttagtccttcctcacatatgatgttgactatgtttaacaagcacaaaagtttttttatattaaaagagaatcaaaaaacaaagaaacttcactctttctttgttgcttatgcacactgattctatgtgaactctaaagggggctcatctcgatccgaaaactaatttcagtaaataaacaaaatcataagaagacacaagaatagatgtgtaacatcacgaactattgaagaatgaagatggaaaccaagacagagatgaaactattgaaagttaggttcaatgtgtttgaaaaaacatttttataacattttaaaaaaaaaaaaatttccacatcattttaataaaaaaatttaaaaaagaaaaaaaaaacattgtttgtcacattaaacacaagttgatgccatagtaaagatttggtaagaaatgactaaaaatgttcaccaaattattgtcactctcattttcactctctctctttctccaatttctctctcttccatcttcttctcaatggtcatgttgccacgtatttttcatgtattttttattaatatttttaaaaaattttatatacacaaacagtaataggagaggcctcccaagccttctttgtcagcacttggttggcttctcaaagaatgtggttccaattaagtgatatcacctccattgcaatgcacttcataaaattattatccacctgtatagtttctctttctcaatcagtaatgcatttaatagtatattgtttaaagattaaatgtagtaagtgtgattcaaattttcaagattaacgcatatcactactatctgtctgcatatttttcttttaatgcgtttgagcatataagtattatgtaatttaggttcactcatagaataaagtctcagatgttcccttgacctaaggtagtgttgccccatgtgagcctcacttaagcattgtgttgataagtggatcaggtcttggcataattatctcatcacattggttattagtatataaaaaagatgtttttcatgtttatattctacattagttctctagaaattgataaaatatgagacaatgatatttttgaattattgagatgaacatttttgataaattaataaagaattaatttaaaaattactttctacatcgattaaaagagaaatcaatctagattgactttcattttacataatgtggttagtttattctcctattattattattattattattattattattattattattattattattatatgttactgtattctctatttcacattttgttgttagtttgttctttcatgctctgttacatagtactttcattgtcatcataatctgttcaaatgctctttgtgattgttgtgttagacctctatatgtgttctgttatgtaatttagtgtgtgttttcaattatgtgtgttctaaacatacttcacactgtcttgattcttttgctcaggttcacattcaccattaacatgatgtcttccacaaaaatcatacttcaattcatttacctcttgaattgccatatatattatctatctataaaagcttcaactatttggagataatctccaactgctatgaaagtatcatgttttgagctaagataacacttacataaattttgtgaaatcataatatatattcggagttacaaatttggtttaataaaaagggataaacgaggagaagagattgttgattcaaatttctactaataaaaaattaataattaacattgctctataaagaaaaacattcaaatgttattcctagacatgcgagatggattaccaattaatcaaataatatttttggattatcaggacattaatgtaaagttaaataaaataatctaacttcttaaagttatgagtatgttttaattttaataatttataatgagatataataatcaatatttatttttttactctcccgcaaaaaaattgtcttaccagatacatttgctgtatattagtaccttcgttaagtctaaaccatttttgttagtctctcatgtaggattaaacgattaataacatatttaattgccaaggactagtaagagtacgtagacaacagagccggtttcttatcatccagtgtgtgaagctacagcttttacttttaaaaacacagctgtgaatcactctggctcgagtccagcaagatttggttaaaaaatgaaaagagccgttaagaaaaaaaaaaaaaaaaaaaaaacctnnnnnnnnnnnnnnnnnnnnnnnnnnnnnnnnnnnnngaaacaggaacagcactaatagtattaatgacacagctgaaattcatgcatctcacagaagaaaacatttactactacagatgaggcaccaccacagatacggaacagagagaaatacattaattatgtaaccgttatctgttatccctcatagactctcaaacccacccaggaaccaaccgttatcaccgaggccaagtgagaatttttcacaatgcaaatggtgaacaagttaaactagatagctagctaaagctttcaccttacaaagtttttatctgacagtgcaggcaactgcataagcccatgacttgagatgttgtttcattgccacatcattatcaaacggaggcatcttaatttgccgctgaatgttaagcatctgaatctgatattcccatgactccacatcaaacacatcaaaatcaaacctcaaatcaacccctccatgaaccacattggttcatatagccccaatttgtgccacttccttctttttctcgtctctctcttctttgtttccctacttggtaccatggccttcacttcttcaaatttgtgacaccttggactcaaattctccacattctgagattcatgttgcagtggggtaatgggtttatgcaaatctctcttgggacactctttggcatggattaaaggtgcagattgatcaaccaaagaggcttcaggctcatctctgcaggtcaagatgttggtgtggaaccagagagagtctaggctttgtgcaacccgtgacccatccatgaatgattctatgaccagaaatgtgaacagtgaacaggaccaagaccatgtaacatgtgaactagtttatacaacaaacgaggaagcttgtgtagtaaatgcgggaactttatattcttttgcagagtttcaatttggacgtacgctattcgaaaatgccaaaagcatgagaagggcaaaacaaaactctcgctgtgtgtttcttcggagtaccaaaatgccctcgagtctgagctgaatttgggtataattcacggggacagtttagtctcattaggaaaccagcggtaacacagtgtgcaccggggcgttactttaacatgttcaatgaaccattgtaacagcatctgcactttccatatcaaaacagataattatcgaaattgagcttagcccaattaaatatgaatatacgatgcctgtgtgcttctgctgtgtttcaagacctaaatcttccattttttccggtaaattctttaaaagaggtgcaacacaagttcccaatcacgcattgaatacattagtgttgatataaacgcacctcatgtaactcaactttagtattatgtttgtattactctatatattttattctagttattatgatatcaaggttttagtcaattggcttacaggttcgggagagtgaatatgttattgagtcattgttgtacagtgattattcccttcgtatcatattatattttgtttgagtttttttttttttaattattgtttgagtattttagtttgtcttaaactagtattttaactatatacagagaataaatacttctttatataattaaaattcatgatattttatttaagatttacaataaataatttagatagggatatgaagttattttatttattaattatttttcaaaaaaatattgaaatttaatttaaaagtaaaaataaaagatggtagattgaaagtaataagcaatattaagaagataaaatatacaaataaagataaaataaagatactagaaaaacaaatatgcaacaatttgctcataattgatgtatgaactcttcccaattgtcaatatggcttcataagctagcgtaacatggaagtggttgagatggaaaagggctgaatggagattgtgaggtgaattgacctccctcaaatgagtatttatgatagtatctgcttgtgtcatttgatgtttggtgtttactatattaaggtgggaattagatttactagacttccacatacaatgccaatgatgtattttgagataagactgctaattttgattgaacttagcaaaagtgttgattgaagtacacttcaaatggattgaggtcactaaatgatagtataaccctttgccaagactataaacaccattaggggatgaatacttacaaaatacaattcagcatctaacttaacaccgatttcactagagtgataatatgtaataaaaaaatttcatcacaatgatattgactgtatttgtaagggtttgagataagataaattttctaacacatgactcaacacttaaactgagtcatttagtttaatctaaaatagtttagcgttatcatttaattagaaatttatattgattgattaataagttgttagttcgagtgatataaaatttatcttccttaattaatgctttagttttgaatcttatagatgaaaaaatattaaatatggttgaaaatagatgattaattagattttttcagcatacattaatcatcatcaaaattagttgatactcaatactaatgttatggtgattgaaannnnnnnnnnnnnnnnnnnnnnnnnnnnnnnnnnnnnnnnnnnnnnnnnnnnnnnnnnnnnnnnnnnnnnnnnnnnnnnnnnnnnnnnnnnnnnnnnnnnnnnnnnnnnnnnnnnnnnnnnnnnnnnnnnnnnnnnnnnnnnnnnnnnnnnnnnnnnnnnnnngaaactattttgaaagtaagaaaattaagaaagattttttttttttttgctgactagcggattattttgacccatccctccaaatttgatattctactagaaaaatgaatgtttaaatttaattttggttctcctattttatttaatttgcaaatttaatccttttatttaaaaataaacatatttggttcccataattaaaaaaaaatacaatttaagtctcctatttcaaaataaagacatttgatctcctatattttaaaaattacaattttgatcaaattcttgattttgattacatttttattttattttattccaattaaactttagacataacatatacaaggcnnnnnnnnnnaattaagtacaattttaagaaataaaaggatgacaaaattgaagattatactaaaactacggattctttaaaatataagaataaaaattataaattttctaaaatataagatgaaaaatctctattttgaaatagtggaataaaaattgtgaatttaaaaaagaataagaagataaaatatctttattttaaaataaaaggtaaaattaataaattaaacaaaattggaggtcaaaattatatttaaaaaaataaaaaaatagatacgtgaattgtcctcattttaaagtggtttttaattaatagtaaaagtattacaaatcttgtcacataaattttaaatattaaaaaaaatgatcattagtttaaattttttaaaatatttttaatagtaataaataaatcactgaattagtgatttattttattcgcctcctctgaaactgggacctgagctatacaaatgaatctgcttgtgtgccgacttatctctttttgccacacttccctccatcctcttctcatctccttcactctctgtaagactgtaagtcctctctcgctccttttttttttttttgctaccgttattttcttttaatacaaacttggctacccaacttcattttcattttgtttccatctctatctctgtttaatcacgcgttgcattattctaattaaatattggctttcactgggaatatgctgtttcctttattcattagcatttttcatactgaattgttttcgccttcctttcagaatccagtgcctgttgtcaatgtcaactgcttcacactgtctgaccatactgcatacttttatagtcatagctgctgatttagtcacatttttcaattcataattgccatagaaagaaaaaaattatattgctttttgtaccataactagaattccaaattaaattttgatgctttaggtctacccatcatcattggaaccttaaaaatgtcacttgtaatcccctcatcctgtgcagcccccttgcatttttctcaacgggagattagcaatttgagttcccaccaaaaatttgcctcttattattccatcaccccttttcaacataaagtgcctttgagttgtaaaacgaggcatataaggactcacttgagaaatgaactatatgttcttcataagtatgcagttaggtctaaggggcatgattttgagtcaattaatgatgaatccttgggttgggatgatgatgaagaagtcgaagatatgggatctccttgggaaggtgcagttatatacaaaagaaatgcaacaattttacatctggagtactgcactaccttggagaggttaggtctagcaaagctttcaagtgatgtctcaaaaactagggctgctgcaatgggattacgtgttacgaaagccgtgaaggactttccaaatggcactcctgttcagatatctatagatgtgaccaggaagaagaaaaaattgaggcttgatgggatcataaaaactgtcatcactcttctttgcaataggtattgccttcaattcatgaatttacattgcctacttttaagtgctttttctaaatttctttatcatctcttagttttgcatttttctttctcgattttactctgctttatatttattttgatatggtttaatacttcaggcctcaaaagttaaaaactaaaatctctatggtggaatatattttgcattactgtaattattgtctagatgctcatttatgcattattttcaaatttgttttgcatgtgactccatctaatataccatattaatgataataagctaggagtagataactccttgatgcctgatactagtcttaggataggatggtgttggtttcctctactctcccttcccttctctttagatttgttaagcccaaaactacataggaactttgattaacaggaatgggtatattgcgttgtgtctcaagatagctcactaggtttttaatgatgagaaaaatatttattcatgaattctagctggaagagcctgcttagttataagcagcaatgggaacagaaccctgtctactagcaggaaacacgtttcagaatatgcaattttcttaattgatatctactagttatgcttgatttaagacaagtttgatgataacagcataaactttatgtgagcagtgacattgaatggtaggtgttcctctataaaaataaaacattagcatagactacactgtttctttctatccacattaatagcttctcttaaagtaagtaacaaattgctattacaatggtggcatgaacatctttcattttttattcaatatgaagtttaacctctaagaatttaaaagtgtgaaattgcttgcattattacacaagattatcaacttgtaatttggttattattctctctggttgcttgtgtaccatagtatttattatgtaccatccaatttccatgattgctgaactgttgaaggcgtgagggtttatatgatatgagaacatatttttttcttccaatttcgattgcagtgccaacattctgatcggaactagatcagaaatggaagaaaagcagaattcctttgttgattcagtgtatctctacaaagaatgcctttgatatttaagagacaggtctcttcctagtctcaattgtatttcaccaaatgacaaactcttctttgcaacaccttttcctatttataggagctactagtttgctaacataatcccatcctcaatgggcttaatcagttgcaggcccattccccttctttctaacattacccctttgtatttctttgactaactaaccctactaactaattatgcgaacatagctaaataaatgacctgtaagctctattccaccagggtctcacagcataaaacatgatacaatttacaattcaccaaaataatgaaattatacccaataactctccttttcttttgacattactttgacctcccttaatctaatataactacataagaaatgagggatggtctgtacactgtgttaacaggaaggatgtattgtgttgtttgttatataagttaaggaaggtttgtgtagtgtaaaaaaagggagggttatcaagtgaaactttgttaaatttcagggagtgtgagtgtaatttgcccctattttttttgtgtggactgaggtggaatgaaggtgcatagaccttacagaggcagatgcggaagtttcattgaactaatagatttaaatcactttgataaaaattgatgttacacaatttgctggtgtggatatcagtcatcaactcactcttcaacaaaatgctctgttctaaattgttcttgctcatttctgcattattttaattcggatggccatacattgtacatcatctgcaaactttttagatataattagcaaaagcatggaagctttaaatcctgaaaatgattggtctccaacttccttatcacttccaccttcctaggattaatacaaatgatttcacagaaaattacactccactgaaatataactgcacttggcttagaactccacagaaaattacacttccaccttcctgtgattgaacttggcttagaactttttattctaccttctattctctttattgaactttactattatttacaatgaagttctggcacatctgcctccaggatctggtgtaactagatttatatgcttagtcctgcaccccaaaagtagtaaacttataatagttgttgatattccttgcacttttggttgacctgtgtcacctaattatgaactgatctactatgatcggtttgttttttgaacaacaattgcttgttgcataattgtattacgttattcatctcaatttattaaatttcacaccaatgctccattaggatttaggctttataacatggaagattcttggggtagttgaaataacatgatatcttgtaagtttacaatagctgctaacaggttaattcccttcaggtatctggatgctaagcatcgcaagtaccattgtatacttattcacctgactgagttatcgaatatcttcctggataattgttttaatgtttcatctttttatgaggtagccaatagtgcaaatatagcagtttcagtcaagtacttatattgaagaaaccaaaaggcaggcctgaaaagaatttattatttgttgactccatgtgaaaaaaaaaaaattataggaagtatgcccctgccatattctataatttattatttccacaacatagaataacttgtttcaatgtgattttcttttgaaggtgttgtgccccatctgctgagagcatattctccgagttctcacttttactcactgacaaacccattgaagaaccagagactattgatatgggtgttatttttggggaagacaaacttacaacctctggaaacagtggtgaggatgactatgacgatgatgcacttgttgacatggatgatcaactatattttcctccagaacagagacaaattgacatttcaaagaacataagggacagggtgcatcttgagattaccatgaattcagtatgtggtcctgggtgcaaaggcatgtgcctgaaatgtggtcaaaactttaacactggcaattgcaattgtagcaaggaggaagtacaagagaaaagctttggcccgcttggaaatttgaaagagaagatgcagttgtaacaattatgaagttcatgtgtaggatttgctcagagtgctgtatcgttatgtgtagaagtcctgaccttaatgggtttttgatgttctgacattgtcaagcgcctaccaagagctcttggatccgtgatcatacatggcatggatgatggatgttattgaatatagatccatggagcattgttctagttctagctacgccttaaagtatgccgttggaatgcttctttccaaatgtattagatccatgatcatacattagtactatttaaattaatattacacacactttattagtctaatatttatataaatattagatactattatttattaaatataatatacaattgatattacacacacacactttattaataaagtattcatataaatattaaatattattatttaatatatttatgaaatataatacccccgtagttaaaaaaaaaaaagaaaaaaagaaaaataataccctcttcgttccataacaaatgtagtcttagatttattttattttatttttatacagactcagaggaactaataaataaaagaaagagtaagtgaaactaaccataataagtgttgtccgaatatcatatcttaagatcatatccttattaaatgatattaccaatgttttatttatggtatatgttaattgtataaattatatatagcatcaatatgtctttattaaatttgtggatataatatcattaatattatgtattcacaaagatttgattttataataatttataaaaaattaaatttgtatttttttttctaaacgggatatcattcgggtcttgaaaatattggaaacataatatagagttaattacattgtctcatggcggtttcgagtaatgacacccgctatccgtcctctcctttttacaacgttacttttagccgcctaggatctaactgcgttttggtttcgttagttgtttaaaaaaaaataacaaataagaagttggaaatatagtattccttaattgcccctgcattaagcgagtactgttcattgtttgggaagggtttcttacgttttagaatctgaagttagggtgacggcaactaacggttgcttgggggaaaatcgcgagagagtgactttgtttagggatttggttgcttggacgaagatctcacatgaagtaggttagcggcgcaaaggttccagcgttcgatttgaagggtagcgtgaaaaccaacgaaggtgaagccaagaagcacttcgtggtaacatgaatccagatctgacgccgcaccccactcaattgaagtttgtctcaacttcaatggcataaaatcagcgcccaacacgcccaagatctgtttttttttaaaaaaaaaaaattaaattcttcaatgggttcttaaatttgaagtcctcccaattttaatattcttgaatagttttgttactgggttgttgctgtacctactcggttgtcctcttttattggtttatctatggaatatgaggtatatataaaatcatctagtacatggagaaactactgtcacgttagtttcgtttgttcttgtaatttgactgaagaaatttacattaagcattctttttttatctctttcaagctttgaagaatttgtatggtattgaacttgtcattgagcttagattgggaagcgaatgttggcggaaattttttgttcatgttcttcattgcctatcttgatttgtttttgaaatttattatctaaatttttcgttaatagtcattaagtgaactgcaaatccaatggtttaagaaagcacagagccatttttggatggtggctttcatttcatgtgctagtcacgtttgggcatctattaacggagtcaagaacattttggggtgaggggtagttgctgttacgagaggcaacaaatttttaggaggttttatgttgggtaaaaaaagaggagtgccaaaactgtaattacatggaacctcaggcctatgtaattacctccatattataatgcattaaatattatcattaatatttttttacagataattaatattaagtgttacgattcaattatatattattttctaaagaatcaaatttgtatttttttttatatttatttacatgtttataatgatgatatcttttaattttggttggaaatataagacttaaatatctttttgttttttataatttaatatttttttattttcattgttataaattatgtttttttttgtttttatcacactttaaataatattttttattatttaaagtgttatttaaagtgttttaaaaattaaaaaataaacataagtgatcaaaaattaaaaaaaaaaattacaagagaaaaatttaaaaaaaaaggttaaattatcaaggtcaaaaagtatttaaacccgaaatataattatgtaatgtgaagaacactacacaatgtgttcttgactaaaactctccacaaaatgaattattcagtactatattccttattgctcatcccttgcttgatccccatttgccggtcttcctcgccaacaaattctagagcttatggccatcatgatcatgggctgcttggtgatggtcctgacctgattggccaaatttgcaatgaaatcaaacaagaccagatgatcaactgcacaaacattctcagagcagacccaagaatcctgtttgaaaaaaaaatcgttgaattttcaaaggctgtccttggacaaagcaatagaagggcagaactttcttaagggattggtgaagacaaaaaaaatattctccagccattgatgaatgtgcaaacattctttatggtggggtggttggatagttcagaagtgccctgggtgagttgaaagatgaacctatatatgctaactatgatgccaaaattgctggtgatgattctgatacgtgtgagattgtactggcttctgcacatattttttaccctgcaatttctgctcttaaccgccaaatattgttgcttagctatattgtagtcctagccacaaataagttcactgattatggcagtttatggggataacatgcatgcatgatgtcaacccaaggtatagtagaggtttctatttgttttagcatctcttttgtagaagggggagattaattgataagatcaaatagaagtttactattacttgtttttggagtgttgtctgttaagatgaaactctatgatttaacagagtaaagaagaagaaaaactacctaccttttttatttttgcttaatcagaatgagtgtacaatcttatttatatggctgatacaaaattaattttacaacaataaaatagaaaagccaactaatcataattgacagctgtttattctaacattgaccatagtcttttcctgcctatgaatgacattattcttacattgaattgtctattatgtgacatttgtttgttttgtgagggccggaaattgtctacttgctcgtcttctttaacttgttcaaggtggttcaagacaagaatttcaaacattgttgaatgtttttcatatgcggtgagacttcatcatcaagatctttgttactgacaaaattagagtctgaaacatccatgaattctgtaggttgaggcattgtttacccttcttcaaaaaaaggcttctttccaatggagatatttagcattgtttgtcaaaatatctattgtcaggctctttctaagctagtcccgatctgcaaaatcagaaaaagttgtagtgatttgcatatttaattattgtcatcctttttttattaaactttttttgcattttaatttcaaaacatatttaaaggagtttaatattgttttctgtaattttaatttaaaaatgaaggcttaaagaaactttaacttaaataggtaactgacaaaggtgagtacgcggtcttttaaaagacaaccaaattatgcttatgttctaccccatgtacttggagagatttatcttcagctttcctttatcgctcggttttaaagaggaaatctttagaggcataaaagataattactacggtttatttgcataattctagctacgactttaaagaggatatctttttttataaataaatactatatttgtataattctagctacggttttcagatattgtagttggaaaaaacaaataacaaaagacaagggatgttcacgtgttagatttgttttttttttttttttttnnnnnnnnnnnnnnnnnnnnnncactcttctctatgattaaatataaaaaagggcacgtgataagaaaataaaccagacataccagaatatgataaagtagaccagaggacaggttattataaggggggaaaacagagaaaaccacacaaagctaataatacttgcaaattttgcatctttactgatcactcaacattttccatgtgcatctctcgtactcgtaggtccacacatataaatgtcatgccattggctacgtgagaatttgaaattacacatgcatatattaaattcgttctatattattaaatatatttattattatattaactttttatcacataaatttaatacttattaattttatattaaaattattaatattttattaatctatatcacatttaggataaaatatattttaagtatctcaattattttttgtcaaatttgatatagattcttatattttaagattactagtatgtaattttggatttcgtattttttttttaaattgatgaatttcatcagtctttcaagaactcaggaaaataggataagagaagaaattcatcaattataaaaaatacagagatcaaaatcataatttttaataaataggaattaagatcaagtttgattgaaaataaaaagacttaaaaatatattttacccttaaaattaatgtgatatataatatatatatttgtaaaatattaacaataaagtttgtttgatcacagcctagattgattctgatgttggatcaaaagattgattccgatgtccatgctttgcctactttgctagaatgaatcatccaattcattcatgaaaaaaagaaacaaaagccttagttgataaaagtaatatatataaaaaattaaaatgttttttttagttattctttagattcggtctacgcacgttctctacagtacaactggttttgtgaaaactttttcaccaaacaaatattagttgttannnnnnnnnnnnnnnnnnnnnnnnnnnnnnnnnnnnnnnnnnnnnnnnnnnnnnnnnnnnnnnnnnnnnnnnnnnnnnnnnnnnnnnnnnnnnnnnnnnnnnnnnnnnnnnnnnnnnnnnnnnnnnnnnnnnnnnnnnnnnnnnnnnnnnnnnnnnnnnnnnnnnnnnnnnnnnnnnnnnnnnnnnnnnnnnnnnnnnnnnnnnnnnnnnnnnnnnnnnnnnnnnnnnnnnnnnnnnnnnnnnnnnnnnnnnnnnnnnnnnnnnnnnnnnnnnnnnnnnnnnnnnttactcttaaaaatattagatttggtgcaaatattataacttaaaaactcgtcgatcctgtgtaggatctgagttcactctagcgtgggttgttttgatgaaattattttaacttaaccaaagatttgaagtcatgagtatgtagtcatgttaaatacttagaaaaagagttataccatccttaatgattttaccaaactcaatcaagcctccagtggaagcacctagaccaaaaaaaaaaagttgccaaatagaaagaaaaaaaaaaacaaatgcttcacactgagcacgcaataagcacgtacataatatatatatatatatatatatatatatatatatatatatatatatatatatatatnnnnnnnnnnnnnnnnnnnnnnnnnnnnnnnnnnnnnnnnnnnntatatttataacataacaatgaaattgatataaccaaatgattagatataaatgattaaaatactgaaattaagattaaatcgttcaatcagtattcaagattgattcttaacaaaaataattttcgatcatattttactcacttctctacttgaactttaaattaatcaaaatcaatttcttcttacaagtcaaagggttaaaaccaaaaactaatgaaagtgatatacattatttgaacgaacatatataatctttatccaaaacaaaacataattcaactattcacgattagtgaaaattacaaagtattttatannnnnnnnnnaaaaaaaacaaagtttgttcaccatcaacctaacatctaagaagcagaagtattcagacctaccatgagcaccatcacaaaatttgtcccaggacctacataagtacacattcagccaataaatctgaaatgcataatgaaatttcctctctttttgtctaaaattacatgtaacaaatttagtggaatgccagattccagaaaaaaatttagaaaagggaataaatacatttctaaattaaaaaaagaacaaggaaaatgtatatatgaaacgaaagaaaaagaagaaaatttttggattatgaaaaagtgcatcatcatctgacagtggaagcaacagtgtgagcccaccatctgagactttctttcatgtcagtttcattgttgatagccggcattttccaattcaccaaagggttctctttttttctcctatcacattcctgaacctcccatgcttcagaaaggtaaggccttggaacacttatctcatcacaatcatcaccttcttctttttcctcttcctttttccctagccgttgcaacccaggaataattgaagccaagcttgagtctttatcctcctctgagaaaacaaaacccagatccatgaacccttttagctcctcaaattcaaggtctgacaaactcttgctctcccttctcttcctagttccattgcttgagatttttttgttcttcttaggacacaacacctcatcaggttctgagtcagtggcttcttttcctgagagaatggtttggagctttggatggagaagaagcactgagtctggtgacagagaatcatggttgaagcttgttgttatcatggataattggtcactcatggatctggtgtgactggttcggatcaagggtagttttggttcttgttcttgttcttcttttatctcataatctaaactttctgtgtaacttataattgatgtgtgaggacttgaatttgtcttcaaaatgttaacctcaaaccagcaagaatcaaagaggttcaagacagcctccggttccatggcggccgaagaggaaaatcagcagaaaagaaaaaacccgtgttttgtgaattgcgtgttagcggaagtgaattacttagtccatgtagataactagaatatatatgcatgtttcatgaccatattgcccttcattttaccctataattacaaaattctaacccaattgtttatttgtttacacgttttgaattaagtaattttgaaacatctttttcaattcatgtgtggtataactttgtgggaatattattttctattttgccgagtgaagattattgactccgtcgaaagggaaatactgtttggaattaggtgggtttatgaataggtaaaaggaagggttaattgattgaggtggaatagtgaattatggatgctactagataaagctagatataaggtaggggattttgttaacaatttgacatcaagttacttatcaaccactaatgtttatcttattatctcttggattctgacattttactggttttcatttcttcgtgtttgtttgatgattacaccaaaccgttttgatgtaaaattaatggctctaactacagcaattattgttggttgcttccaaattacacaaacttgaattgcgcatgtcactgtggttggcatttgcttcttaagattttcaaatataaaactctagaatttaagatctcttgcatgttttagtgtttttcttgtttgtttttctcatactttatttttttattacagtttttaacctttgttgccaaaacatttgactcttgtgatgatagactgatgtttgaaaatgagtttttatatgtaataatgtctattcccacctctggcattcctctttagtgtaattaatgttttgtataattaataggtttagaaggaccacacacgggaatcgcttcaaagtagttaataatttgaattaaattaaggtacacgtggtttttactttttgatacataacctacacgagatcaatataaaaaagctttacattatgataaattaggcatcaaccaaattatattatagctttaactcagatcacgtgtgaacaacaacagcacacttggggactgttagtaaaatcaatgtcatatagagaaagggggaatcagggaataatcgatattatttttagatacaaggggagaacagggaataattaatataaagatatgaattttcctaaaaaaaattcgctacacgcctgcattgctttataacacgtaatggtatgggaatactgatgtcgtgtatggtgtacctacttgtataagatagtactgatttatgttttaatttcttttttatatataaagaagtttaaatgaattgaattttagaaatttgttaaaaccggacaaacctcaatcttaaataaatgtttccagaacaacaaggtgaaaatcaaatgcatctcctaataaaatatgagtctttgttaacaactggatcaatttctctttttatctcccttgttaactctgtgtgaatctgaaaataaataaaatatttatcaggtgttgactattttttgcccagtcacgtgtgcatctatacaaataaaatattcattcagacacgcattattggtagtcaaattcaaaatatttattgtattccaaaactaagttcgaaagggtcctttagtaaatactaaatagtaaaaattaggcagcagaatttcttttaaaacgtcgagacaatctgaaaataaatacatttcacaacaatgtcaaactgattgtacatagtaagggatccctctgaaagtgataaaataagtttattattaataaaatcaataaatactttatatttataacataacaatgaaattgatataaccaaatgattagatataaatgattaaannnnnnnnnnagtattttttttttttataaaaggagattcgaattcatgatctcctttttcttcactaataaatcatccttatatcttccgctatgatagttattatatagggtctacttaatactaaatgtaaaaacacatattgaataaatatgaacattattaactgtccactaataagttgttgctgatattttcttcttgattccttcttccacaagcctagctcaaagaaagaagagataaaagagtcctatagaaaatgtgatcaaaaattcataatagaatcctatcacaacgaattaattatcttcatgcataagaatattagattatcttgtataaaagattcaaaaatcatctcaagcctttctttttttctattttaatttttggattattatataacgatttttcaattttttattttttaaaattttttatttataaaaatagatagactagaaattacatctcttatctcaatgacaccaaaattaggaatattaaacaaatgtaattagtatgtaaatgtaaataatgaaataaagtcactttaagatttcttatgaaatgaggttttactatggttgggacttgagggaaaaaaggatcaagagagtatcagctgcacaaaaattgcgatattcacagaatttacagataaatgcaacggaggagaaacaattaaatgcttctgatatttaaagtgctgctagtctctttaattccccattatgtttcagccaattattagtatgttcttatgaactgaaatcatcatctaattctgtaaaactatattttctgagtttattatctaattacctatgaatttcattgtaaattccttagccaaacaagcaagacaaaaaaaaaaaaaaaaaaaaaannnnnnnnnngtgaaaattacaaagtattttatatgattgtatatcgaatttcacatgattattcattgaattatattctaacagatgacaatatcaactaaaataacgtagtacaatgcaatatcaacttccttttatttataagaactttttaaacttaatttactttataaaaacattcaatttaatagttacattaattaattttgtatatatgcaaaacatatcaactgagaactcttattattattattattattattattattattttgacaaataaaaattataaatataaactattagatcatatttaaattatcaaaataaaagataaatgtatatgatttatttaagtagtcatgtgtttatatgactcaaatttatagtttttatttctcatgatattcaagagttctcacttaatgcatcctctttccctctctctatagtctatattattaatattatttagaatttagatatatttgtgggaaaaaaataataaatatttgatatattatcacaaatattgaaatgaaacaaacggactaggacaacatatataatttcctatgaagaatattcttgtaataaactgtgattggttactcggaattcggattcaagtatccaaagttgaacttgaatgggaaatcaataattaagaaggccaattgtccacgtgctacttgcgtctctgttgcattaaaaaaaatttgtctctactaagacatagctttgtagctagaagcgaaaggcaaatgtttcatgctatccagtatccaatatgttatttaatatttagagagaatgaaataagaaaaataaaataaatatgatagaattcatgatataataaaaaatataacaaatatttttttaataaaagatatacaattttgaataattatgtatcattatttgatataaaatttgtgtgtaaattttacttactgatgaaaaacataaaaagatttgtcaatcattcataaaagttgttgtttgcatgactgaatattttaatgattaaactgagcattataatgtcctttcttaattatgaaaaacaaatatatataatttaatttacttataaaattacttacttaatatattttttttatttttaggaattcaaaacaaataaaaatttacaacaatttatacactttgctacaccaattggtaccctccattctcaatgattgcttggcgcctatcttcgagcgtggacatattatgaatgtataaatagaaaaagtgttttgattctattttttatagagttttgacacaacaataaaggtccgatagatgttgaagaattagagcagtgcattaatgcacgctcaatgtgtgaagacaaattagaagttagctatattgagcatgggcgctaagtgcacgtttggacgcttagcacatggtcacttaaaacaaatgtactttgcatgtgggcttattgcgcacatgcatgctaagaacatagtcatttccgaaaaacatgattgtgcagagttttaaagattataaaaagggtgacactatgcttttggaggggattggttggcaagggcaaaaagagagcaaaacattcacttgggagttcttcttccattttttttccatttcgtttgttttatcttttgtttttgaacctctcatgattatgagagactaaattatccattgttgagggcttggataccaaatactctttgatgtaatgatccttactattcatttaatgttatttcaacattattccttcctttttaagtttattgtcttgtttatggtttgatcactcattaacatgtatgttataggattttaatcatcgggaaatatttttactctaagaacttgaaggagcttctatgtaatccatgtctagggatagaatgatgttatttagtcttatttgcatcgttagtcttaaatcaaattacttagtttaactcttaagggattataagtgaaattagatggtttaagcttttttgcatgaggaatcatggttagagtagttgctaaacggccaacaagcgcaccgatttgtcaagtaataaaatccggtaagtccagatgttgaattccacagggactttgcttatactcaagactaatacacgtttgttttcaagtgatcaatgaataaaattgatttgtaaaatgagttgcattatattaaactgtacttaaatgtaaattgaaagcttaataaatacaaggagagaaacacaaacactcggaaagtgaacgatggaaatatgatgccattggtgttaagagttcattaaccgaaactaactttgatgcgatataaaagatttttctctattcaacgttaaatacgattaccttcatccactagtataatctaaccttgattccccaagtgctagacctaaactacttaatttcacccttgatccctcaagagttatattaaacgatttgcattaagattaggaatgacaatgtaacataggctaaacaagaccattctatccctggacatgatattatttagaagcatttctcagttcttaaagcaataatcattttccaacgtgttaaaacctaaaacaagcatacaaatgggtgatcaaaccacaagcatgaataaagctcagagaaacaacaataatgcgcaaataatattaaatagatagttagaactttacatcaaagtgttcgattggtgaactctcaacaatgggggttttagctcctcatttccatgaggagcttacaacaatggaggttagggcaatggaagataatgggatggaagggaaagagatggagaggtagctccaatggtgcaaaatgatgtctccgtcttgacctagcaaagctccaagcttctctaagtgtgtgtttttcctttttgggtctctacaatacttctttccctcctatttttgccttaaacgctgccctatgtcgtggtacttgctaagtgcgtccttttcacgctcagcgtgcctcaaatagtccagttggattagtgaccacgcgttgaatgagctggtagcgctgggcaagcctggtcgcactgagtgagtcactgctctcgcactgagcgcgcctgttcctcgctaagcgagcagctcgaaacatgaaatccatctttcatgcccttgcaataaattctacaaaaaaaatacaaccaatacttcataaatccactagttaaagcatccactggatagaagctaagaagaagctagttcctacatttaaatcaccaaaaaaagcattaaaagaggaaaaaatagataattgcaaagtaatgtatatgtaactttatgtatacttagcaattatcagtagtttagttgatgaagataataattgaaataattttaaaaggtgaaaaatccttaatattgcatcaaaagtaattttggttggccaaacacccaacacatctaaaagaatatgcaccaaatatcaattttcacctctaagtctttgttttcttgtctcttacatcatactatgcttttctatcctttattatggtggaagtttatatttctacactatcactttgaaaaatatttagttttagtcattcatccacttaaaactcaatgtatacaaattctgagtacaaccaaagtccttatgaggtcttatcattttaatattactttaacaaatttgtatacctgttaaggagttaacaataagatattgaaaataataagatatttatggatcattactcttaaaaatattagatttggtgcaaatattataacttaaaaactcgtcgatcctgtgtaggatctgagttcactctagcgtgggttgttttgatgaaattattttaacttaaccaaagatttgaagtcatgagtatgtagtcatgttaaatacttagaaaaagagttataccatccttaatgattttaccaaactcaatcaagcctccagtggaagcacctagaccaaaaaaaaaaagttgccaaatagaaagaaaaaaaaaaacaaatgcttcacactgagcacgcaataagcacgtacataatatatatatatatatatatatatatatatatatatatatatatatatatatatataaataaatagatagatagacagacaatatatgaaagtgataaatgtgcgcaggatgaattgccgggcaaatcttctttggcggtgaacatagctttttcgcttcattgcctgaatgtcaagcagctgaatgttcaattcaactgccaaagaagtcattgcccagtaatgcatctgcacatgagtttgcttttcgataactaatttctggttatccatgtctatatatagtgtagggggtgataaaactaggacatgcatcgcacaagactaaggatattcccagcacatcctctgctcaacaactggttacaaaaaagaaagtggtccatcctgtgcctttagtctcacagctactgcacttttactgtgagattggtaccacaggtttttcttctaaaattccatgcatttaatttttaatcaacaaacatgtctctacacaaacagaacaagcaatgaaatgggagtccgtgacgaagaaaattccatccatctgaaaggcataattcttctctattccttttctagtgttttctgttcactttaagttaagaatatgctggtagtaaatacctattccagaactatgtccaattctcaatgtcatggttgaaaaatcaaccccccttctttttctcacaagcgatgcattaccaaattctgaaataacaagtctaatgatattgtgatctgctttcaaaaatcaatgcgatctttccattcaagtgactaaatttattattgattgctgatatcatacggcttgtgtagtatactgagtaaccaatgcagccgacactttgaaattccatttggaaacagtttctcaataaaattatacataacataaatatacacatgtatgtatgcatatggatcttcttatgtacctatgtacatatgcatgtagtcatatgaaaatttctaggcaaatttgagctattagagaaaaccagttgatcttgtgttaaattatgctctggcttagcgatttattgccctgattcaagcaatgaaagtgcaacagcctgaggcaatttgtatgttgaatgaccaaggttatctagaggatttgttttgttttccctcacttgtctatctctctttcctcgtttaatcaggatggtcttcgaaacaaagagatatttttagctaaattattatgagaatgaagatattttggtatctttttgctaccggtttattcttatgtacatagtacatactcataccagttgtaaattgagaatcttttcttttcttctgtctatggtgacagtctgacataaaatttcataggagaagtgaacgaatgtcaaagaacctctggaagtaggtagaaattaatcaagttatgtaagcaaatcttcatttaaatttttacaataaattcgtgaatagtaaagcaaattctcttccattgtgtagtcatgcttaagacaggttcaactagcaaaatagcaattcagcgttgaattcttcatagtggacgtggacacctctaagaaatgatttatataccagagtaatgaagtgtggccttgaacatcaacttggtcaaagattagaaaaacttgtaatgccttgtaatccccagagtaatctcattaagctttatcgtcctatccaacagtctataatccaaagtaagtggctgctagactctttacacctttaattttattcacctgaaattttgttttggattgattaacacatcataatatggacttataatcggcatgaaaaggaagtccacttctgcatgcataaactacatatacataagtactgatagttcatttcgtgcatgtatatacataaactgtttatgaccaattcctacataggaaaagcatctgatagtaaatcatgatataaacaaatccttgtttttgaaagggattgatggtgaaagaatttggaccagtaaataacaagaaccttacaatggaattgtaccggcatatgctgtctgctcctaatgcttatcagtggcatatccaagttaggtgctcatagctacctataaatagccttccattttatgatgatggcctcagacacaaatttggtgttggaactgtgatacataaaagtgctgttgaggaatgatagagcaaatctccattggcagagagaagtagagggcttgaacatgcatgcttctggtttgccaaaggagatttgccctgccattttttaacagtttctgactaaatgcaatgtgttggctattttctatcttcttctatgactgtatttaattaatttctttcctgtttactaacggttttcctttcaatatgtggtagatggacatggagaagtttcacttttatgagacatggagatcaaaaggatagaaagatagccaacaatcagagattttccaagacaattgccagcatttccagtttcatctagtgtcatggagcaaatgaagatgcttaagcactatactgtgaagttaacaaaaagagaagtttcagttagcaacttcgtttgctgcattgatatttgatgcacatatcttacttcttattcatctcgagaaatcttcaaatgtcaaaatctatccgtcaccatttcagtttaaataaattccatgtgttatttcacgttcaaatgttttgcatttactacaataacaccccaaatcacactgccaatatgagggtttcgtttgtttaacgtttagttattcattatgataataaaactaaaaggttcgtactctaaaattcaaatgtatattgaaagaataaacagactgatgtcgagtataactttatgagcgattatatctgaaggtatcattgtgataaaactttttgataatgcagaaaatccatcagactgattcagacatgatgcccaagcagcatctaagagcctatttgttttagatttttggtataattgattttacacctttgaaagtgattagtatgtgtgccttaattaaacatgtgcctggtgtgtaaattcatttttgcttgtaatccaaacaagcacttttcaagcattgattggacttagacggcgtttgctgcatgccaactcgttttagtttcttctatactgtctttttttctcatttatcccttttaggtccatctagctcaacattattaatggagcctaagttcatattcccttctcaaggagaagttttgctagtacaaaactacaaactagaattttgcaagtttgagcttgagaacatggaaggcgatgaataattttttcaatgattatttttccttatttatttgatggtaaagatattagaccattatagtagcattcatcaatagttaaacagcacttcccgccaactcacaatgtcttaaatataaccactaaaagaaattcaagctttttaattttttgactatctaataagaaattctgatcgaccttatgcaacttgttaagaggtaaaaaattttgcatatattttacatttgtttctgttaaattatgagtagaagacagaaaaagtctgtctcctatctttggaattatttaattattattcaaaaaaatttcttctattattttctaaaaaaaggctttcatcatctggtatgaagcgttgcatctcttgaacttataacttgctagtatagtgaacatcctcacatgaaaatcatagaagaaaagcattagtacattgggaaagacattctgaagataataagcagagactaattttcttgttggtaaaggataaagaagccatactactggtgtgcacttatactttgtcttcataatattagtgtgatcattgccagagcacattgtcgcaagtattgcatccatgcattatgatttctatccaataaacagagttggggctgagcattggtttgtcatgcgaaattaagagttggattctggaaaactcagttccggaaagaaatctaccaaacttgtactttcaggctaggatacaatcagaaaagtaatgtagattaattagtctcttatgaattacgaacttctccctttatatgattttatgcttaatacttgttaactttagaaggtaagtgagggaatacaccttagatgattaaaattagttatattatagtcatcagtcattgattagaaaatcaactattgagatactagccttattgtttatcatacatgtgcatgtgtatttgatcacaatctcaacagttggtgttctaatcaatggctataactatactttattgtttaaactgaaaattcttatttcagaggagttaaatccaactttttacgccttacttcatctcattgtttctgtaggtatcatgcatatagatgacaacttttttaaataactataacttcagacctgcgagtttgtattgatctaatgcattactatttaatcttgcccttccattaatgcagcccctcacactttaaagggccaatcactagtagcagaataaaactttaaaaactgaccaagagcagaaaattgtatcatatataatataggtatttaacttttcagtactttagaatatcaatcgtgaaaggtgaaagaaaaagagaataagcttgctgaggaggaagatccatatgtttgtgctatgccttactttctctcctctgtcgtgtcagtttgttgacaattaatccttcttttgtggtcagatgaacatgtgaatttttaaatctttaatataattgacaaattattcttgatttccatgaaaatcattctccagaacttttggttgtaaagattacagttcacaagatttaacttagtaggtgctgttgccatttcagtatatccaaaaaaaatccttgttctttgggattttacaatattgcatgactgaagaagtcctttatactttattttccacaattattgtatactagaacatcataatgtggtcgaatggtgacattttccactatcagcaaaggaatcccaggaacacgctaaatttgtaaaccgtaggttgccaattccttttctgtgatccatacgcgaatgatatgcactgtttaaggtaaaatagtggagaaaaaagaaaaaagaaaactttatcaagcagacctttaaaaacaatgaatttgagaaagaggaatctaaaagaatcaattcattacttaggttgttcaacttgtgacttcaaataatatgaaattgaccaattaataagagtcaatttatttgataaatctcgtaagaaacacttttacaagttaaaataaatttatacatctgtttctcgaaaaacttaatttttcttacaactgagttgtgtaggttgattttaacttattaaatcattcattttatcttcttaatttattttagcctcctctccaataatgtttatgaaaaatttatctaaacgagtcttatataatatatttcgtttatctaataaatcaatgagggttgatgatatgctgctagcatataataattttaggttaaaataatcaataattcaatcataatttatcaataaaagttaggataagtttaagtttcatcaattcttggtccattacttattttatacatattttgtttaataggaatcaagaaaagaagaaaagaagtataatcaagaaagatttgtcataaaaatagaacaacataggagtttaattaccctaaatataaatatggatgtgcagaaaacaaaggagtgactttttgacaaaaaacaacacatagaaatgcaaagagaaggtggaggaagaatcaaagctaataggaaaggattgaatcaagattggaagcaattatttctcctattgtcttgagattgtttgtttaggtacatgttattcatgtgtttaaggttagttatgagcatgtctggctaattccctttactatggttagagctaaaaccaatgtgaactcctctgtaattggattcgtgttaatataaattgtgataattgttttattttattttgttcttgaataaattattccttattagacttgatcattctagtgagcttctaaggtttagggtttataataggaatgttggagctctaatttctgaaagcattaaaataacaatttttacattacctaaggatagagatgtatgattacagagcaatacatgtattagcttaatgcttaacttaatagggaattactaagaaattaggatttctaattgaattaaagggttaaattactaaggaattaggatttaactaatttatttaaaaatacatcatctgagcaattagaataattgaaagtagtaactaatttcaatacagaaggtagagatcaaagctaaatatgctctaaccacaattcttcctcatcactgcataactcttaattaatattgcttttgaatttttattaatttttaatttaattattaaattttcttaattccaaaatacaatcatattctctttaaaaacatattatttgtcattccaattttaagataacaagttgcgataaaattagtgtctcaattattgtggagacgatactctatttacactttattatttgtaactataggtgtatttgccaatatacttgccgctacgcaacagttgatatataggatatataatatatgagaccaggggccagcctgcatgccttcaagaaaaatattgtagtggttcaaactacactgtagtccttcagtggtaatcatggaaccaaaatatgtgatacaaaaatgatgcaattaattatggaagatgcattattttctagtcagactggcatttagttgtgcatgtttaatttaaagaaaaataccaaactaactaatgaaaaatcataaaatgcttcaaattaagttccaactgtaacgaccttttattaaggtttgttgaatgaggagctttatcacagcaagggggaccatgacagcaacagcagacacaacacaaaggagttcccgaaggataatccgtagcatataccagtacaatcaaaatggttaattggtatacttcacaggtagagaacaattaataacagtgcaaatatactttaattttggcaattactgccacactcttgcttgagatatgatattttctgccaaacaagaatcgcccggccactcagcatcatacgttgcttcacaactacaagccttcttaattagacagcattggttgttctaaattataatataagttgaaatgtacaacttatgattgagttttcctttaatttttacgggcacttttatcattaatactactaggttttagaggttgaccaactacaacatgaaaggatttggattcctgtcacagtcgagaatatgaaccgttaaatctttatcagacggttcttattatctgactgcgtgaatatatgttttctccgactccagagaatccggatccaacatgaaaagtgttttaaattaaaaattttgatccatcctgtcctatcaatataagtattatttttctaaagttaattttgatgaattcatttttaattaaaatttagacccaacaacatattttgaagaaaactatcaatcaaaatggttctacccagagagttaatggcattaattaatgtggtaacaaaaaaagttacattaattttataattcgatcagttatatataatgttaaaattaatatcttatataaataaattaaattgattcaatcttattttatatattattattggatcgaatttgaatttagtgagatgttattgatttttttgttatcatgttataagtgtaaagtattaattaattttgttgatgaataattttcattgaaaatcatgataagacatcttagtggatctttcttttcaatcacattttttctcacaaaactcaaatttgaaacattgcctaagatgtctaagccattccacttggactaatataaggttggaggattaaattttgatcatatctaagtaaatagtcaaaatttccaattagataaagacaaaaataattttgtgctatttttttggtccaaattatagttaattaaaaatgtataccaacacttacaaaatannnnnnnnnnnnnnnnnnnnnnnnnnnnnnnnnnnnnnnnnnnnnnnnnnnnnnnnnnnnnaagaaaaaatatatatctttagtcgatgtgagatctccaacattaccttacatcaaggtttgaacatcttaagcatgaagttaatttgcaagtcttaatatttgtggatgttccaacaacaattcctacgatcaactttaatatcatcttaaaattttgagtttgtgcatatgattgaattttacaaaactgacttgtaatatgatttttaccccctatttatatactcttctttagatatatctttagttgatatgaaatttgcaacattatgaattcaaaagaacatgcataaatcttgcataatcctctactctaagctaattgtaatccatgaaatatgtataccccaattagatggagttattagaaattagtacatggatatagggttatccatcaaatgagatttgaatgacataattaaaatcgaaaccaatgacaatgaagcattaaaaatacactgatttggattatttctttgactagtatagtttttgtttaacgaactgttgatatagatattataatctattttataataaaaaaaatattaatagcagatacgatacactaagatcggcttaattatagggatttaattagaatgatatgcatgaattcataaatttaatatttactgttgtcattgttaaaaaaaattgtctaatgcataaaacctagtaatgcatgcaaatttaatactaaactagtgcattagtctaaaccttgtcgaacacaaaaaaaaggtgcaagtacctttttctcgtttaagatacttgttcacttttgatagcttaaacagtgacgaagtaaatttaaaaacagtatattaatgtaaagtacacatactttaaatctaaacgactattcaccttactataagcaaaaagcaattatgggaagaaaaaaaaaaaagaggacctcatgcaagtcctaaaaaatgaacgtagcacatgcatcaccttctagtttcaaccactacagtgaatgttttactggataatcagatgaatcccgcacatgaattaattgaaaaagagttgcaggagaattgctgggcaaatctcctttggcaggttgcacacacttatagtattgcatagcttgttggtgcctgccaaagagaacttgtcctgtaatgcacccacaaaacaactagtaaactaaagatggcacacattaaggatggctactgggaagattatttatcgcttgctagaacgggtatatcctatagaacaatgccttccattttgtgtttcatactgttttattcctttgtctaggaaccatatatcccttttggcagtacaaaaggaaaatcaataggttaaaaaaatttagagctagcaattttatttctattttcattttttgttttagcttttaattgacaaaactgtcacgtacctcttatatatatgttaatttgattcctattttcaaatatttgtatagaaattggaaaaaaaaaacccatcatttttttctgtatttcctatataaatattttaaaacagaaaatatataaaaaataaggtgacaattttatatattaaaagtaaaaacagaagtaaataaattgactacgaaaattaaattcatgatggcatggtacatacatgttgcattggcgacctctccaaactcgaaaggctttctcttttttctatctctgaaggttaacacatgcttgccggagaatttatatttgtataggatgttaaaatgttaatatttatttattattgttaaccagaatattttttaaaaattaaaccaaacatattggaagaacttgaaaaaatctaaagtaattactgagtaagtaaaagttatgtttaatttaaattatttaataattaatatgaagttaatattacatatcatttaacgtgtgctaccttcatttttctcgcagctgcagcacctaatcaaatcacaaggaatcaaagaagaatcttgacctcttttttcctttgaaaaagaaagagaaagccatcataagcactttggctcctggaggccggcttaagcaatgtaccttttcacgtttcaagcttagggtgaccaaccagaatatatggttttagattttctgcttatacattcataaaaaggaacttgatttatttttggtttaaagaattaaggaatctgaatattgatggaaaggaaaagaagtgcaaatagaaagagaataagcgatgaattatgctgctgcgagaaaagaagatactataggcgaagttctcaagcacaaggttagccatcggtgctatcaaataaataatggaacataaaagttgtttatgaagaaactagaagcagcatggatttggattcttagcttatgttggaaagaatgaaagagattttaatgagttgtatgtgaaacgtatgctctctattcctaaattgcatgaagctcactttaatttggtactgctcctgctttgatgatccaaatctgtaaatgtcatatacgaaaaaatgaatccattgaagtggaannnnnnnnnnnnnttttttataaaaaaaaaaaaactcagtgatacttataattaacacattaatattgttactatcttcatttttaatctttagttgcttaagatttttatacatgattaaaaatatatttaatttatacaactttatatctaaaatccctcatttattatttttcaaatttctatattattttcaacgacttattttttcaatgcaaattttactacgacataatattaatgcttcatcacagtatctcgtaaaaataaaagttattaatatttcactaaaataatcttaattaatgctccaccatatataagggcatagttagaagaggaaagagtaaattatattaatcaatcttgaagttttatagaattacataaattcttcctgttttttaattcctacaccaactcctttaattatttgaaaaatacattacaaataagaaatattttttgtaaatgttaacaaaatatgagttttgtgtaatttcagagataattagtataatttattctagaagaaaatgtcagttacataatggaattttaaaataattaaagttttgaaacaaatacaaaatactaaaataactaaagattggggatgaagacagtattagttataggtttttaaaggatcaattgaatgtgaaaattcacacccaaaatcattaagtcatcttgtaatgatcatcgcctcaaagttaaccgaatgagtttctaattaactacaataactgtttctaggatttttnnnnnnnnnnnnnnnnnnnnnnnnnnnnnnnnnnnnnnnnnnnnnnnnnnnnnnnnnnnnnnnnnnnnnnnnnnnnnnnnnnnnnnnnnnnnnnnnnnnnnnnnnnnnnnnnnnnnnnnnnnnnnnnnnnnnnnnnnnnnnnnnnnnnnnnnnnnnnnnnnnnnnnnnnnnnnnnnnnnnnnnnnnnnnnnnnnnnnnnnnnnnnnnnnnnnnnnnnnnnnnnnnnnnnnnnnnnnnnnnnnnnnnnnnnnnnnnnnnnnnnnnnnnnnnnnnnnnnnnnnnnnnnnnnnnnnnnnnnnnnnnnnnnnnnnnnnnnnnnnnnnnnnnnnnnnnnnnnnnnnnnnnnnnnnnnnnnnnnnnnnnnnnnnnnnnnnnnnnnnnnnnnnnnnnnnnnnnnnnnnnnnnnnnnnnnnnnnnnnnnnnnnnnnnnnnnnnnnnnnnnnnnnnnnnnnnnnnnnnnnnnnnnnnnnnnnnnnnnnnnnnnnnnnnnnnnnnnnnnnnnnnnnnnnnnnnnnnnnnnnnnnctaggattttttttataataagaattaaagatatatattagaaattataataaatcacgcactatgtcaattaatgtaattggactcccattaggaaggattgtttatgttaaaaataattagcttatgttaataaaaacagaaaagattgtttataatatatagatttttataatacattatgtgtgtatatatatatatagtttacattttaaaaatatacaatttttatttaactaatcttttaaaaaaagtagataaattttttttataaaaaaaaactgtttattttaaataaaataatttaaataaatacattagaaaatcataagactatttatttaattttattttaaaaaataagattaaacaaactagtccaataactacttaggagaagataattttatttttttaaaagaataaaacactgcaaaaacatttattaggaaagatactgtaatttatcctaatcttttttttttcttcctttttgtcgtctttgattaggtatttttgtagacgaagttaattatgtgactaatccacgaccaactaggagagttatgtatagttagataaaatctatcacctgatgacaacttcatgattcaaatccttgtaaataaaatttgtctgcattacagttcgttttcgttatgcaaccaatcactaatgggttcgttcatttcattttcaccccggtatactgtactaatatgtgtaggtcctcctaattctgagtgagattgtcatggcgcaaaagcagatatggtccggtattcccttgttccctgtattggttatgttcttcatttctcgtcactaataattgacattcccttacttctgcaccaaatcaaaaattattaaaaactattattaatgattaaaaaaagaaaaacttttcttaatgataacatgtactttaaagaattaattgaactacgtacaagtctacaagagctttactgtaattgaagaaaccatatcctactatgctttcctcagtaatgcagctgcagcctggaagtgtaatttctactgctaattaacgttttttacgactggtaagaatcggcatatcctatgggacaatgccttcataatattcttgtgattgtggcctttcatctttttctttcattttcttttatcttttacatatatattaaagataattttgaattgaagtaattaacaaaaacacagctagcagttcaaataaatgcttattcagcacaaacaatgaactttttgtacttcaacttatagtattgaattcgttgacagcaaaaagaaatatttggcaaagtaacttacaccaattatcacactttttttagtactaattattacaatttgataatgactttatatatggtttgaatccattataactttatcttattttattactgtatcaaattttatcaaaattaaataataaaaattaaattattaatattaaataataaaaattaaattattaatattgtagtattttttgtaataaatatattaattacattaattttaatttatataaataagatattaaataattttatattaataatttgtatataaatatatgatcaatttatagaaatttttaatccaatgacttaggatacatgagcaaccacaaatctaatattacattttataacaaaaatcttaaaattcaagtttacaagtcttctttttacttatataatattcaactttcttattcttatatcatatgaaatttcacttcatacttttactccaacaattattattattataaatctcttggacaaatttttatgatcacaaaactttcacttatgcttttaaactaagttttaacatagatgaatcaatgaatataatttaaataaaaggtttgtagtagcaaaaatgtgaaacaaaagagacaaattaaaaatattaagctaattattaaatcaaccatagacgacaaattttcgcatttgaccaatttaatcgtaggagagaagtttcacatgcatgctcttcattgtaatgtacaaattatattaaacacatttcttcaaaatgagatagtaaacacattacttccaccaaatatcttattaaacaaaatgtgtttcgatatctcattttggtggaaaagccaccaccaaaatatcattaaaatatttttttaaccacttgatgaaaatagtatcattcctgctccacatactttcatcaagtcaaagcagaaattaagtaatgagtaaattaacataaacttcactgaaaaatataagcaaaaattattctcagagaagacacaattgatattagagtcgcaggagaatcgctgggcaaatcttctttggcaggttgcacactatgcaagtatgcatgcataattgcatatataatatagcatagtatagtaaagtgccaaagtagaacttgccctataatgcatctgcaactgggaaggtatacgaagcggaatggcttctgggactgttatttatggcttgctagagtcagcatatcctatggaattattctgggcttttcgtatggttatttaatccatagcgaaccaacttcttaaagtgaaataaaagtaggtttctgtaacgtttgtgattgtatggtacatattgattgcattatgtgttggtaaccatccaagctagctagctgtaaaaagttgaaacccttctttccagctacgaaagtcctaaatcagcttgcacaataatttatcttctttttttttttcgaattcaggttggtaaatatatagatgattaacaattattatattatgaagaaaaaaaatatcttaatttgcttttctatatgtagaatttaacaaattttgtttcattattaaccatagttggttaaacaatatatgtgaatatattgttataatttttttatccttagtttgattcttatagatttttttatatataaattatttgattggaaagagtggtacagagaaggatgagaattttggttcttaatttgtttacatataagctcagaaaaggacttaaataagataattagaaacacatggagactctttattgtataccctttgttgagataagacctatttgttacctattatttaaatttatatatccttttcaacaatgaggttagtttttttcattatattaatatttctctaattaattaagtgtagccttattttaaaaaaataataaaaattcttcaagaattcatgccaataaatagattaatataaataaatatactgatatgaattaacgatcaaatattttaattgtaatatgttttatattaaaaaaaaatcaagcaattttttgcacaatggaaccaattaaattaagggtgttgatagtttataacatcctgcttgtgtgaattttttttctaccacaaatgtttcaattatgcttaattaattctatggtgcacttttaacataaggcaatttttttgccagagtgaaactaaacaccgtctgtaagttgtgtagaatctcaaacaaacaaagannnnnnnnnnnnnnnnnnnnnnnnnnnnnnnnnnnnnnnnnnnnnnnncatatagttgtgaattcattctttaaatggttacattaacgaatgctttaaagatattaattaacgagtatttactatattctattaaataattttaattgtttaaaaataaaaatattgaattattttaatatatttgatatgataaatatttttcaataagaatttctattaaattaattttacaatcaatattcttaggagattaatttgcgttgtcttttttcataagtgcaaagttagatattaattacaaatatgtcttttaaatactattgtaggatacatttaattttttttataaccancatatagttgtgaattcattctttaaatggttacattaacgaatgctttaaagatattaattaacgagtatttactatattctattaaataattttatttgtttaaaaataaaaatattgaattattttaatatatttgatatgataaatatttttcaataagaattttctattaaattaattttacaatcaatattcttaggagattaatttgcattgtcttttttcataagtgcaaagttagatattaataacaaatatgtcttttaaatactattgtaggatacatttaatttttttttataaccattgtaattaccgtttttccttcttagtaaaactctggaatatctttataagttttggtccttaattaaaattgattatgagactaattgttgatttgaagtgtatctcatccctatttaaagatgtgttttgcaaaaattgttatggaacaattttagcattcactctcaacggattatgagtgatattatttcttttgaagtatatattgggtggggcacattgcatatgtacaattgtgttttgaaaatgttatttacagacacctttggaatcaaatgccaattaataatattttttttaccttttaaaaaaaagaattaaatttttccctacaaatttaatatgtattgtcaactgaatcatatcattaaatataatgcatttaattaatacccacaaacaagaaaattcttactaattttgtttgaataaattaaaagtgataaaacaaagaaacaccctgatattatatattgtacaagacatgaactcattttttatttttattatgattatcaacgttccaaacttacaatcttagctaactcgacatatatgtagttattaattagaaagtaatatatgtacatgttgcatgttacattaagaatttggctatgcaaaagtgtgtgtgtgtatatatatattatatatatatatatagggtaaatattagtgtcgccgttattattgttcgagtgcatccttctttggtttttatttctcctctcaaataaacaataaaaatttgacattttcgttctatatatttttctttttgaatttccttcttctctatttccaccaaaacaaacttggaggcaaagaaaaacctaggcacactggaagcatttttaatggacccaacttatagaattatgcccacttgtttacttacatatacaagccgatcgagtcaaatctggtcttacatttcccttgctgtgtaaccctgtaacgtatttaacgatatgtggcgaacatcagatagaatagaataatcaaagaaccaaccaagtatcgcagaaaaatattcatatatacgtccttttatatatgaacatgaacctgttaggtcagaatatagtacctttcaacggagagtgataaataagaatatatgttttcagattttgtgtttatgcattcataaggaatctaattttgttggaaagaaaagacttactgttataggtagaaaaaagaatagcacgattatgctgaaagaagatactacagcacattctctttggcttctacacgcgatatttgatatcggtgactagcaaacactattatatattaattgacccaaaagttgtttatgttgaaactagaagcagctcaaaaatttgattgtatgcttgttatattcgtattggagaaagagagccactttaaccaatttttatattacaaaacttatgctcactaagtgcatgaagctaagcagtactttaaagccctgattaagatactaattaactaagaattccttattacaaaagattgatttgacttaccccatatatttacctaaatcttgattacacacacccaaaaaataataataagtagctttggcaactatcttctcgatcccatcctgacatttgttcattcctaatatataagggaaaattaattttttaaatattgtttgataatgtttaaaagaaattagaaattaaacaggggttcttaaacaatatggttagagcaactctaaccccagaatattcagaagttacttaacttacttttattaataagaaacggtcacacttcctattgcagtgtgggagacttacaacatgtaagcaatgggagtttattcaaggcataaatcaatttttttttgaaaggcaggtcataaatcaaaattgcttgccatttttgggtcccaataaaaattgacgaactgaaacaaaaaataaaatgagaggaggcacatagtagtgaccatgtgaataaaaacatgatcatatttctatttatatgatcatgtgaataatatgatagtgtaaacgtagttttcaaaggagagatacaaagatgcaagataatttgtctggttcaattcataaactttttaattaaatattttagaattacattactaaagggagaaaaaaagttacttaaatgacaaaaaagtaaaaacttatgcaattaatgtgttataagatggattcatacaaattataaacaaaaagcattctaaccattagaggtctcctatatataaattatgcacttactagtcttttttttgtgttatgtgaaagattacatttatcttcccattcactaaattagaaactaatcctgttttcattatgagataatcgctgattcaaaagaattttatacacaaaacaaatcaaatattagttttctcactgaataaattgtttttccacgtttaaatacaatggggcctataccactttactaatcctgtggcttgtgggttattctcctgctggtctatactaaccaaaatgtaaaataaattataaaatcataatatcgacttcaccgaaaaagatgctgggaaaaatggtttttaccaaaatacaaaacaagggaaatatggcatatgcatgaatggttctacatgcaacatttcaaccagtacaagaaatgtttctaatgaatggttgaagaaactaacgaatactgttttcatgaagcagatgttgcaggagaatcgctgggcaaatctcctttggcagattgcacactaagaaagttgcaaatatatatgagatgcatatcatagtggctacctgccaatggagaacttgccctgtaatgcagctgcaactgggaagatccacacacacacatagaggaatgcctttggaaacgttatttatggctcgctaggatcggcatatcctatggaacgatgcctttattttgcgttgcatgtgtccttttataaggttttattcttttgtatgcgaaccacatcctttatggtgaattaatttttacattgaagtgctaaccggcaacaaaagtgaaaagggaaaatgtaactttgtttctccaatttttgtgtgtggtacatatataggttatattatgcgttggtggccattcaaagctgcaaaagtcgaaatcccctttccaaatatgatattcccattacaccaacacaacagtttatctttctatgtttggttgttaaacttgttatatgggattaaaatagaatctttgattaatttattttgaaaaacaaagcacctataaagaactttccttttatagctcttaaacagagtttaaaaaattagtattccattgttgcaatcttttgcctttctaacaaatttataggaagattggaaagagaaaaagcatcagaggcatccttttaaataagaaaatacaaaaagactatagaaactattactttacaactgacatgaaaatattaatgacttctttcatttcatgggatctctttgattttataattgccaaatgatcataagggtaattattttcataatttcaataattaaatttaaaccccatgaccatgatacacagctaggagtgtctgctagatctctttctgttatctgataatttcattcttcatgtttagtcactcagtttcttaattacaattttttgtagttaactaagtggcacactcaaatgaaagagattgagttaattaatattcttcctcaactttttttttttgttggtttaagatgtttacttgtccacgactattgggagtcaaattgtcacaacaattaattattgatagacagtagttgtgattttattttttatctaaaccacggatattttttaccggagtcaatccttacatattgatatcattttaattctccttagcacacattgaattgtgaacaatatggactttaatgctagcatctaaaataatttgtttggaactacatgctgttcaatttgcataataatttgtaggagtgacatcattatattcatctagaaacttgcatgtggaaagtaaaagtggctactgttttcgaatggggaatatgtttcattggattgtgaagtcatacatccaaaattatacatagatacataaatatcttttagtataaaaagacttatttccatggaacaaattcagttggttcaacaggataaaaaaaaaacaaatacgttatgttggagaaataaacttactttccaaaattctctcaaacaaattaatagaattaagtatttaattatttaagatgagttaactcaattacgcacagaatttattacgagcagaagcaacgtactgctccttgtttaagcatctaatgtttacgtaccaaaagattactagtactacttatgtcaaaagcttcacgtgatcgatcaatcacatggtctttggacagtgaatgaaatacgaatttgcatactgagaggaggtgggtggtggaggctagggagtatttattgagcctcacctagaagagtacatacaatttcagtttcagttgcatctctcacatggcctctatttctatagttttaattagatcccttagattttagtatgttgaaggaaatataggtaattgataatggagtgtaggtgttgaacagctttgaccagaagggaaagtttttattctcgtactattcaacatttcaaccctttgttttacttacttggaagttgaaagagatcatacatacactttaattatattaccattattccaaacagaatagacattacatgaaaacaaattctaaaggggagccattatgaaggtattttgtgaggtcttggaccaggttaactttctggttctttcttcgtggaaaagattgtagaagttgccaattaccacaatatgttagagtccggtgtattgaaattgtgggaagttttgatgaactttgaaattgctagaatagtctttcctttgtttcttggcaactgctcgtatagttaaattttgtagtatggataggatataacattttaattaatatggatatataggatatctcttatatagttgaaaactctcataaatactcatccacatttcctttcatctcttgcacattattgtgcaaactcttccttaacaaaccaaataaatgcaaatcctaaagactggccagagaaaaacaattaaaattaaaggtgaaatattgaaattgcattcatggcaaacatatatatatatatatatatatatatatatatatatatatatatatactattttcttgcaactatccccctgaaattaataacggttaaaatgttaaactcagaagatatataggcctgcctgaaaagcatgcccattgccaacaaccctaaaaggatttactattacctagccagagtaacttcatcaaacgtcgttcagagaggatgagagaggaagccctgcaaatggaaatgggaaactttttgtttttgtattaaagactataacattgcaagtagtggatcaattaatattaactcaacgagttatcgtagtcaatatgcaataaaacaatttttgttttgttatgatgatacaagagtggaatggaatgacaatttgtgtcctttgttaccatctagtttgcgaactgaactccatcatccagctcctaatctagttatgtaaataaatagtttctaatcttcttcaggggactatatatatataaacatttcctcaactccaattttatagcaactctaatcttcttcatctctttataaaggtgtttatggttttgctgctcctcctctgggccaaggcgaagaatttctttaatttctcagggataatcaaagagatgaagaaggatgttcatgcactttactggtcatatatccttcttcatttcttgaatatccatgaaaaatgaaagaaaaagatgggagtagcgagagacctcgtttggttactggtgagaaagggttgttgagaattgaattgggattaaattcacgggggagagaaaacgggagtgctatgactgtgagggtgacgtgagattgaatgtgagtgatgaatgcatggaacccctaatcgtgggtatttattattgtggaaaattaatgagagggagagagcgcgcgtggtgaatgtcatgtctacttgtgaaagagtagggcacactcataattttttacatttacatcagcatttaatatctctcattttttttttctttatctctttttagtacatcattttttcatttttctctatggattggatatagcaatattaaggcctatttcttggtgaaagaataataatatttagacatttttaaatatcaaacacctcatcaacacacttaatttattttaatcttttttagaaaaatagttgataaatacttattttactataaaagtatattgattaaacatttaaaataaaaaaaaatgtttatatatatcatcttttttttttttatcatcatacatcattttaacatttcgaggcagctacattaccgggcaattcccgttttgggaggaggctaccccataacatgtaataattgtgatgctctaacttattttttatttaacaaacattattatttgcattctgaaaacaatgattacaggttatggtaaattattttagtttcctctagttaattattttacacagccgtactctactatatgaaaactgtgtaaaatattgacaaatttatctttgaaagatagaaatttaaatttttgtctttaaaagaaaaaaatacaataaattcatcaattcgttagcttttgtctgtcaatgaaagagtttacataatatatttaaggacgaatttgtccgtgctttacacatttaaggatgaatttgtgagcgttttacacaaaatataattcaatcttcatctccctttttttaatcatttcaagcataacattataataaatactaaaaaaatgaaagcaaacaaaagttagaataaacataataataagcataatattgattaatatttataatttttttattgctctaaaatttttattatgacaatattagatagtgacaaaattaagttgagtctcattttgttgtaaggcttaatttaatgattatgtattttaatttgcttgagtctcatattttggataaggtattgtctcatatttttgctttaaaaattttaatgtgacagtactttatccaaaatatgatactcaaacaaaaatgtaaaatcattaagttaatccttaaaaaaaataagacttaatttgattttgtcactacctaatgttgttacaacaaaacaacagacatattatacttatgaatcaatattgaacttattattatatttgttctatcttatatttgttttcctaattttttaagtgtttattgtatttttatacttgcaatgattaaaaagggagaagatgcatattaaatttttgaactgacaaattcgttcttgaatgtgtatagtgcttacaaattcatctttgaatatgtcgcgtatgttctttcaatgacggtaatagacaaaagttaacgaattgatgaatttgttacacttttttaacttttgaaaacaaaaattttaattttcatattttgatgacaaatttatcaacactctacacattagaaataaaaatgactatttaatctatattatattaatgattccgtgtatccgcacatgctgaatcccgatcagctggtttctttgtttgcaggtctgtattattaaatgcatacatagtttattcaacaacaaaaaatgcatacatagttaaagtcaaaatataaaagaaggttcatcattttaatacgagaaccacattttttacttttgtacagtgtgggatacggacgatggacccctttccttgctacgttttctgctaccactgccacatgccctcccaactttgatggatccggctcattgagttggtttatttgtcccgattccatcttattggtgcctttcttgctttatctttttgtttaatctgacatatatatatatatatatatatatatatataataacgcagtccggaggggaaaagataaatgagttgttatttgattttcatttttattttgttcttatttaactttagttattgattcttttgtttgtaaataacaccacaaaaaagttgcatagttaatgttggagtttttgtttaagagtttttgtttaaactctatgagttatgaataagaggcggttaacaattcaaaatagtaactacttataaccgctcttgggaaaggttagaaaaataactactcacaaccgctccgataaccaacggttacgatggtttatcgccaagagtcgcgatggttcatcgccaagagtcgcgatggtttactgacaactcttcaccagggttgtttgttgtctataaatagacacagagacagtcagaaaataggaaggagaaaggaaggagaaaggaaggaaaaaagaaggaagtagaaaactgatagttaacttttctgatagtctcgcttagacactagtgcatttcatatcacataactctgtggttcctcaagcattgtctttgttcgtttgggctgttgatttgaagtgccatcaatcttcagacgtgatccgttctatcctgtgagacaattgttcattaacctttggcatcaattggagggaacaaattgtcttaaggagacaacattgttgggctcggatcctttcatctctttgcatctgtttctgattcatacttatcatacaggttctatttaaattgttttttgtacagttgtagtagattatgttgttcctcttgactactcagattctgacccttgtgcaattggatatattccaattctaaattaactaatagttccaacagttaattaacaagtaaataacaccaacgaaagtaaatttgggcaaacgtaagcccatcagttgttaattgaaaataggctcttgtttgtacctctatttcattccggaatgcaaattacatttcggaaaggaacttttcagaaatcaaaattgcaggaagtacgatccctggaaaatacatacacttttgtcatgatattgggccaatatgagcccatgagttttcctttctaattttgcttctctttttaacattaaaaaaataatttatgcctattaagctcaacctcaatcttatgaagaaaaaacaagtttgggcctgtgtttgagcccaacgtgttcggtcaacaaacaaacagactaaaatagcaatggagattagagaccgcaattagagagtgcaagtggaaaattaaaattttaattcgcgattaggataaccagaaacttaacttgccctataaataacttacacaagaatgcctcagttttggggagtgaagtttttttcatccttttggcttttagtttcagtaactaattttattcaaaaaaaaatcttaagatttcattttatgctagaattttctgtttgttcctaattcctaatttaggttaaattcgtattttagtattgcataggataaatatttattaaaatagattagatattcgaaaggcaagtagaattaattatggaatttgataaattagaatatatgggaacaaacaaactgtggaattttgtattgacacgattgcttaattgaagtaaaaattattctgaagaaaaaagaaatagaacaagaactaattgtagtgtttagattatttttcaaatatttggctagaagagcatattttactccatggataaaaaacatttcatgaagattaagaggcatacggagcatgaggggtttttatcgttatggttggcaaggtttgttttacctacttgatacccagagtgactaaaacatagctctaacacattgttttagcaagtatttatggggatttatgtttactgatagtcaacaaaatcaaaattgccacaaatgtttattactttattcttttcttcacttttatatatagaccatgactatactatttaccttcacgacttttactttcaaaagtgacgtatctataatggtgaacacaaacaaagattccagttggtacggaggatttgagttgtgtggatggtttaaatggtaaaactcacatgatgcaatgatggacatgaaaatgataaagatgtaagaagtcttgaagtacaagatgaagaagctcaactctcttttggccaaggaaggtgggtggtcgcaactagagacccctaaattaaacaccaacatataggacccttgcataattaaacacctcttcgaagagaaacttaaattggggagtagaaaatgttggttgttcacttcaatactttctatttcccaaatgacacgattgaaaagatagaaaccttatgtgtaaaataatgttgcataaggataaatatatcatacgcaatattatcgtggattcgaaagtttgaatataatactctaaagactagttgttttcctaaataattcaaattacaagaacaaaataattttgggcgttttatcttgtgttgaaagtgtttcatcaattgtgtcaaagaaatataaatcaagctaagcaatagtttttaagaaaaatgtatgaataaagataagtccgaattatgaatttgcatgtaataattttttttccttattccaattttaattaaccctaagttaatgatttatcactttaagttaatcaataacctatggtcaagatttgaaaatactcttccccctaaattaattcacaattagtcatttggaatttaatttatgatcagaaatgaattatagaaatatttgaaaaaaagatattcatgccaccagtttgatcatgtaagttttatgaaccttatgattttacaagtcagttaatcatgagtaaatggtcactaacatgtaattaactatgaattagaatgatcaatttcaatgtaaaagagaaacaataaaaaatacgattaactgaattacattagagaactcaattaaatatgaaatcaaagtacatgggtacaagtacatcataattcaagctctaggggtttagccaatcatgttcacaatatagccaaacatcaaacaaaatagcattaagaataaaagagatcgaaaactcttacagattagaactctaattgttcctggtgcagctctagaattcagaaaatccttgttgtttaaaagtaataaaaatataacctaaaaatgtctccctttttttctatttatactattgacaattaaataacagcgccgaggtcgacaagggtcgtgctaagtcaacatgagttgtcctaaggacaacatggttgtggtcaaatgtgtgacattgattttgatttttggttctgaaacatcatgtgtcatgctattagtagtatggtcattcttggatatgtgaagttgattctgattttttgctctggaacatgggtcgtgctcaaatgtggggtgctaatgagaaattttcttggaaaatcaacataatcatgctggaatagcatgatatgtagatacaacacgggtcgtgctctttaaagaagatcataactatttcttttgaatttttttctcaatttatcatctttctttctcaattgttcacacttatctataagttcttataacaaaataaagtcaaaataggataaagtgggaaaaaaatgggattcaaacatagtcaaataacgatttatcaaaatcttggaagttttctcttttctcatcattatcacaccttttgcaagtatactaaattctgcaataattaattagtaagtaaatatatagttacaataagagcatctttagtggtagatctcaaattgggatcttagaccactttttggtagatcccatagtgtcatgtaggattgaagatctctcaagatctctcctattttgttctttaatggtagatcttattttgagatcttagagagagagaaagagaaaaaaaaattattttttttgaacaatatgcagatcttaagggttcttctacaagaactcattctccatattggagatctctctacatcctttattgggagatctagtgaagaccagatcttaagctcaagatccttactcaagatcttgcactaaagttgctctaaggatatgtgcaatatttaacaaatacacaatattcactatctagacgatcgaaaaatgtatttaatatgaacaaagttgaatgttataataatatatgcaaaacatcgatttttcaataaaaggacgattaatcactattttaggacattatgtttcgtaagaagaatgttatatgacctctttatgggagattggtaatatttttttatggaaaatgttggttattcatgtgaaacatgtttattgtctcctttggagagtttttagaagacgcaaggtaagattcaaaaacagtagcatgaagaggatcacatattatgttgtgatgtatattttacacttgcatacttcttattgtaatcaagccaatagggttattagttattagttatgatcgttggtgaattcaacgctaaatagtttaacttttcttcccgttatatataaatgtgtacccgttcaaattaatgaaataatcgaattcctaaaagaatatcttttaaggggtacacaatttactactaaatcctaatatttatataaatcttaccaattaattctatcattcaaaccactctaacgccagctctctgaagtctgatcagtcatttntatatcagcattctaagttttcattacttctatattattgccggttttttttttttttgtgcttttatttccttacctctcgaagcacaaaccaaagacatgagcatgttagcccgtggaaaggtttggtggtatacaaaatattgctcccttattttgagcatgtgagtctagattccatgagggatataagcaaatgaaaagcatagagcttttagctagaagccaatgaataaatacaaatctaacttcctttttcccattcagagagagacaagtcgagcacaaatggacaactgaaaccaatggaaggatgaactttttgtcatcggtacatgagaggatatatgaggagacactaaagtagctagtcctctttcacatactagctcgcagccttcaaaaaagagaaaattagtgcgtacaacaaaacaaggctaataagagcaatttaaggaggcatgcaactactaaaatccaaactttctttttgccttgtagtgctagtgcttgctagtgcaagaatgagatgattcagtagtggacaagttctttccattgccttttatgctggttatgtgctatgtgtttgtcatttctagctctagagaatgaccagccgatcccatggtttattccaaacggtttccttcaacttggattaatattatatagctatagcacacatgcacacatcctgcattttatatatgtgtcggtctattaaataatatttaataattaattactaattccttaaactccttcctttatccattgatcagtgatctatctctggtttagtttagctacatacaggcatggttacagaaaattaaataattatagccgtgcgagtccttaattatatatataggatacccacaaattaattataaatctaaatcaccacaataattattttggtgttacaaactacttgtgatctggctgtcacaaaccaatcatgtcaactacatgacatttatgttgtgaattgtgatataacaagtagctaaccctaattgatttaataaattcaatttaaaataaaaaaaattaaattataatgccaaatacttaattactaagttcctacttggaaaatgattttcttagataagtttgcaccaattaaaaatagaggatgcatttgcgaatgtgataaattatttcttttcacattttttaaagtgcaaaaataattcatagacacctgtatataaatctaaacccagaaatataaaggaatgaaacagaaaaatgtagataaaatataccacaatatgatatgatgagagaaaaaaaattaaaggatatatcaactaggtgtatgtaccgaataaatgtccatatatcattagtccttaaaataataataaaggaagagggaaataataaatataatgataacataataaaaaagagaggagacaaataaagaaaaatacaaggtcagtttaaaagttagtatttgaaacttgaaagagtagaatattgttatctataaaaaaaaaaaaagatttgaataaaaccaagtacaaacatgtatgtagatttttttcattttaaagtgcgtgcttgttaaattcattcaaaagttaaaaatcgatataagtgaaagtcgatcataactactaacttcttactaaacgtaaaaaattacatatataatgtgagattaaacagtaaagacatgatcagtcattaataaaattaatagatattttatagtgatattatgaagatatataaaagatacattaaaacaaagaatataaagttttaatattattattatttggtaggttgaagaacctaatttatactttaggaattaattgaagtggggtactagccagcgaatctggctgtgcagaagtcggaaaagggaacgatataaagaataaaacagaaattgtgtcagtacatgtgatacaactgtggccactagctagtgaaggtttggcatgggaagggatgcaaattgcaatggaagaggtagagtagagagagacaaaggcaaatgaaaatgaaacagaggcccgtgaagggtgtgagtgatatgcatgcatgtatgcctcattggcagtcactgatattatttctgactgagaaagaccatcctctcttattgtccattggttcagttcccacatcccttcccatgcaaattttaacagtctcctaatcaagaatatgacaactatatcatccacctttttatgctcccccttgttcagtttctgtgattcgtaccaatccctttcaccaactgtgctgtgtggtgataagggctttgtatctagcacattgagaaatgagaaataaagtagtgtttacttggcttagcttttttcatttacaatgcaggtacatatatctcgagaagggatgtcacttaaatcatgaaaatctattttactatgccatgaatttggtggttcaaaataaaatgaaacatatactttcaataatcagttaatctcgatcgggagtatgataaaataaaatgagataagcgaaataaagaaattaaaacagaataaaaatactattaacatactcaactccatgtgtttaaagaatttaaggtattagtcacttgtgttatattttatggattttcttttattaaagattatcactcattgcttgtaaatgagaaatttatgactactgattctgtgctaatgaaaatcccatcatttcaaagagtagaagtgtacgtataaaactataaatcattataaaccttgaataatttttatcaaccttaattttttatgttcttggctcttctttttttaatatttttcaataaaaactatacattccaatataaatttataaaaaataatttaagtaggcatttcaattacgtttaataatttaaaaataattttattaaaattgattttactcaacaaaatttagtttttacacctatgttatgtgacttatgtctctttgtctctccactttttttatcattcacagtctcgtcagtggctttctttttcccatgtcactacgtgtaataggtgtggaggtgtcagctagtctttatccaaattttaatttgggttcttatcaaagtagaaatggactatttttatgaattcgaaaatggcaagaatccaagacacatcactccattcaccagctataaataccctgccaaagttaagtactcacaaatcacaatataacattcacattcactagagaggaagataaagttatataaaaaatactgctttacagaggagatggcttgcagggtgcagaaaaggatttcactgcgcagaaaacttcacattgtgcgagtccttacctactcaaactctgtaatgctatctaacaccatctattgcaacctcaatttctttcccatggtctcaaattgataataactatttttcatgcaatgaagtaattgtttctgttttgttttgaaggccaagagaatctcccttgccaagagtaccgttctacgcttatacaagctaaagctcgcactggaaactgtcaaaagacagtatgaaaacctattagccaccagaagagactgcattagcctattgaaccatgtcaaagagaacaaggtatgcttattctcctaacctttcctcaaaggcacacattaaaaacaaggcctatatatagaaatgaaaatatcctatcatgaataacatgttagagattagaggttgactagtgatatgatgaaaatagtacatacaagtgaaagtccaccattagctattttagaatttaggtttgaatctgatttaattttaatagttaacttataaggtgaaaattgtctctattatatgcattattattttgattatatcaccagttaactgaattcgagctattttaaaattttagtttgagcttgatgaattcaattctaaaagttaactaatagagtaagagttgtccttatttatattgcattattttgatcatatcagtagttaacagaacatctttatgcttatgatagctaacatgatattgaatatttcttatatatttaatgttccaattaaatgaaacaggatgtgaaaatagagaatgtaggggcaggaacttttatggtgaggatcacatgcgagaaacgaggtgacaatctggtgtctattttagaggcatttgatgagatgtgtctgaatgttcaacaagcgagagtgtcatgtgaaaatggtttttctctggaagccattgctgtggctgagaaccaaacgctggatgtaagagacattactgaagcgcttctaaaagctattggaaagcagagtggtgaaaaggactcgcagaagtttgacaaaggctgtgatttgtaacttttttaagtactttaatttgttcaacatcttgtgtatctcaaactagttaataccaatgtcaagttcatcttttatataaatcatattggtgacatgggaggggaaaaaggttgagtaaggctttccattatcaagattatatagtgtgtttggggtggcagcacagtggaaaaagaaatcgtggccaattccacggtggagccacagcaacacataattgcttctcaaaattcacggtgacaccatttttttgttcgaaaattgattatgcgccgccgtatctaaacacatgatcattttcctactttaaaatgttgattcctaaccaaatagagtggttgagtatgagagattgacttattgatttacctatcgtgccttttgccaatgcacacaaaatatttcttaacaaacggatcatgaattcgtgttcataattcacatttttcatatactaacttgtaggagaattagatatcaatttgttaacttctgttgtgaatttctgtgtttttatttttttgctgatcttaagctataaatatctagaatttgctttgtaactcgcctaatctgaggtgaagtgagtagagatccatttagaggagataaagctctttctgtgtcaatttttttttcattaaaattcctttgaaaccagattttagactaaaattttccttcatatataaagtgcgagggaattagagaaacaacagtgtttagttaaattgatttttgggatgaacgaaatagagtggagtgatgtaggagagatgttttatagggaaaataacaagacaacagcataaatacaatagcacaacatgcaagtgaaaaataaatccctcccaatttataagaatttggaaataacaacaacaaacaaatagctggagacaaaagaacacaaatatacaagaaaaattaacaatacaaaggtaaaaatcaaaagccattcaaaccaaaaataattctacaatgttcaaataaaaataccaataagtctcaaaaagggttacaaattgtacgtttataatcggctaaatatatgtcaatgcttacaaatgagaaattacccaaaaaacagttattatgcaattcaagctcttgaatatgcaaacatagttacctcaatccccagtccaaattctgaaaaacaagaataacgtgtcttgaatctattgctcaaattttaaccaaattcaatgacaaaagaatcaattttatggtgactattgggtgcttatgagagttttcttttcccttttttccccctcttttattggttgttttttctcttgaaaataagtctctacatccttaacatgaaccatcttctctttttgataaaagtaactgcgtttattattttgacttacaaggtagaattgaaagtgattacgagaaaattgaatctaatccaaatacattctagttcacatttataattgtcctttcattcctcatgttacactcatgttggggtacttaaattaactaattatatattcaactggttatacctaattgtaataaattatatataaaattaattatgattataattataatgagaatttagagcatctttaatgaaaaatagttatatggattttttagaatttcttattatctttttgtgatttttatagtgtcatgtcactcataagatttcttacaaaattttactctaatacaaaaaattataacttcaaaaaatggtggtgtttgaaaaataaaaaacgggataaatgattttttctattaaaaacctaaattttttctaagaaataacttcttatttttagaaatccaccgaacatctctcattatatgcccttataatctaactatttattagttatggttatcgttatttgataatcaatcatgagcatccctacactctagctttcagtcatttctcagttatagacgggtgtggattagctgcagtcggaattaaaaaggaagctcaatctctacacttaatcagttaatcttattattcaacccttacaaagctaatcaaaaagaaaaaattgtaatccttgtatcgtaactgcagagtgaactcactcaactgtgggaaagttaactgcaaggaaaatgtttatgctaagagagataaaaaagaaaaaatggaataaaagtgaaatagaagaaaatttaaacttattatcttctccgcccatttccatttcctatacactgttatctttatttcttatttattttgttaaggtctgtgagcactgctcatacttcgtatgttctcttgttgtactttgggttgggccgagaggtataagtcttgtaggggtgccaactttttttatttaactacccatgcataatgcatgtacatgttgggcatgtacatgttgggacggccaagcttcgacatctttttgtataagtcttttgttccaattttgcctttaatttcccataattatttgtctcaagtcttaacaaaaagagagagagagcgcgcactgagcaagacatcttttacgactgcatatatccgttgatgacgggaatggatgatattataaaattatatactcattattttttgaagagtatatactcattattattacagctgctgataataactatatacttatattataaattttatatcactaaatttacaatataagatataacttcttatgggctaaaatatacaaatgactctttaatttatttttttagttctaaattgatcctttaacgttactttttttttgaaatagttctcttacttatttaatttataataagttaatcatttcaaaaaattgttattttttaatttttgaacacaattttaaacttttttattaatcaatacatgaaatttgttcattatatttatctacataaaaattattatgaaaatcaactaatgtttggacaaaaacagacataaacaaaatgaaaaatacaaatacataaaaattaaatcttatgattaattgaaaatctaaaaatcaaatattatatttttttattatttatgagactaatttgtcacgtgatttttaatatatttatgactttttatattttgaatattagttgattctcataatatttatgtagttgaatataatggaataaatttcatgtattaagtaaataaataaaaagatataaaattatattcaaaaatttaaaatgataaattttatgaaaagactaatttatcattaattaaataattaaaaatttaaaaattttaaaaattaagaaactaatttaaaacaaaaaatagcatgaaaaattgattttatattcctatctaatttatgagtatataacatatatttttaagggacaagaatttaatgatgataaacatataaaatatattatcattaaatgtctgtcacttaaaagacatgtttcttatagtattattgataaatgagtaaaaaattattgtaatttaacattgaagaacatttcaattttaaattttttatttgaattatctttgacagggttgagagcttagattaaaaaaaatagtaatgttcacgttatcgtatttatggaaaaactgaaatcaaacgaatcaataataccggtggaaaaatcttcaaatttaatgcgacttacaggttacacgaatcatgattctacagggcatgtgagttacattcaattggtttggtacaaagtcaatgagcatggggatcatcaaattggcattattctttgaaaactcgaacaatacacacttggaggattgaggatatcatttactattaattaatttatactacatggcttcaataaaaagaaaaaaaggaaataattttcccaaggaagcaaaacaatcaagcaacctttgtcaaagtttagcttaggaaaaggacaaaaatgaaaaatgttcagcgtgtggaagtgagatgttttgatgcctcgtctagttcagccagtaatttatttaaaggtagcaaatacttacccatccatatttaaattattaatttgataaatgaagaaataaaggtgttaatcaaaatgttgtaattgatgcataaaaatgcggtagaattaagtgggaaattatatccagttaattttagaattttcattgtttacatatttataaaagattaccccgtacaaagagagggttaaattcaataaaaaaaatgtagttaaaattttgaatttaatacatttttttgtatacatatatagagattttaattttatgaaatgttagcataaacttttaacatcatctactaattatgataagtgtgattatatttttaagttaattatgataaaaatcaataaacttacttacaagtgcaatcagatgataatgtaacaagtttttatactatcaatagatttactatttattcaagtgagaaatgaaacttataaatctgtcatataattaattaaggggtttgaaaaatgaaacgaataaatggagaaatttctgtttcttggaaggtggcggtgacatcatgatgagccattttacagggcaaaataatatactgtagtagtaatgctaaacgatcacatcaacaacaaaaataaaagttagaaattcacatgaacttaaggataattgttgtataaatataaactactccattaaatgtctatattatgagtcataagtaggccttcgattattttggaaagaagatttagattatctcacgatcttttgtaaaataaacaaaagcgaaaatatataagatatccagagaaggtagtatataataagaaagaaatttatggtggagaataatgtgcatcactaatgccgtaaggaaaggaagtcaaaatttggggaacaagaaacctatcaaatacattattttttcccccgactcatttgtagattgatatagttattatttttctgacaaaatgtagaaaataaaaatggattgaacgagtttcacaatataaaatttgggttgctggagataataaatgatcaataatataaaaccagttgttgcattgcttcacgcttttaggcaccttagaaaattgatttgttttctggtctttgatattttttatgtaacatattggccaataggtacttccattccctttcacattacagagcgacagatccagccataagtgactcggtcaaaactcaaaactaatgggatctgaatattaaatgatacgtcatgacaaaaatgaaaatgttatttaaacttttcgatagctacccattctctagaatttagatacaaaataaatgtgatcatataatcatcaataaataattaaaggtatattaaacaattttgggggtggtgaccgttgtttagctcagttttgttgtttttcttccttttccccctatcctactaattaacaaatgattaattagttatatagttgcaatatgaaaactgaaaagtggatctgaactaagaatatcccttttatgtattttctcataattctttaatataattaaatctaattaatttcattcatatttaatgatattattaatattccttaaacatctttcatttaattataactttattttcaaggactttattttattattgatatcaaattttaataaaggatgttttagaaataatcttatttcctacttaacatttataaaatgaaattatttcaactaatcttcttaatttatataaaaataattatttttatttaaatatataagtccagagagaataatatgtaatcttatatacaacccattcataatagctttagctaatgagctctttatatatagtaattttttctttatgcattttttaacaagatggagagaaagactattaaaatacaccaatagatataaaaaatgtaccaattaatgtggtgaaaattgtgagacttaaggagagatagtagattatcaagtgagtgtccaaaatgatcttctcattgtaccactaagttggaaacnnnnnnnnnnnnnnnnnnnnnnnnnnnnnnnnnnnnnnnnnnnnnnnnnnnnnnnnnnnnnnnnnnnnnnnnnnnnnnnnnnnnnnnnnnnnnnnnnnnnnnnnnnnnnnnnnnnnnnnnnnnnnnnnnnnnnnnnnnnnnnnnnnnnnnnnnnnnnnnnngtcaattgttaaagaacattttattttgtttttattgtcgtttattcgcattgatgtaaaactccacacatatgtcagaaaaaaaaaatcattcttgatccccttattctttttcgtttattcgcactgatctaaaagtccacacatatgaaaaaaaatcgtccttgatatctttattcttctttcatgatctattttctctttaagattttatgtatacgtctctaacttattacatatatgctcataatcaattctcatgtgtgagaaatcaatatttttatgttttattgagtcttataataaaattataacctttagtcatttgtgagtatattttaatcaattatttttccctatttatgatttgctcattggcatccaacataatcaattgaggtttttagagagaattttttcattattgagaattgattttccaggttagacaatcaattctaaagtgtggtatgcatacttgattgtttattgttagagctattatcttattatctttgatctcattactctcctcttttttcatagtaaaccaaggacaatgctaccgtagaccatctttataagtggtctaaagtgcacaatttttattcatggctagattcatctaatcctcactaatatagcatgcacctttcacacggaattattctctccctaattagaaactctccaccgctgaagactccattatcgttgtgtatttcttagaaacagaaactcctcctccaccatcagccgcaccgcgcgcctctgccattgtcgcagtccactgcctttgcctcctagaaaacaccgcatgcatagtgtgttaaataaatcattcaaatgttcaaaaaaatccaaaatagaatgcttcacttgaaaacatcatacaaaatctgaggggaacaggaatctccaaaaactatagataatataatttcaccttaacagaatcccacaaagcaagagaaaaaagagaagacaaatcatgaacatgtgtagcacagtgggttggaacatatcgatgtaaagtagtaaacttttaccaaatagattacacagcttttgaatttccggtttctaatttctgattgaagcaaccatcatgaaatggaaatgatagcaaaatttatcaattgggtttcaaatatggtaataaaaaaatatgggttgtttgggtttaagattaaatgaccgaagaggtatatgatattgttgaagaaggccaagtggaggaggtgtccatggagggatgcagggagatggggaggtttctgtgtttgttcgtgaatgtgactatgtgaggatgacgaaggggccgaaagtgaaggatgcgagagaggccaggagttctacgagtaggttgtgcgtttcaatctggtggatttcctgaacaactgaggattccgacttgcggtggttccaaccaagatttgaggttgcaacgtcgttcccgatgctagactattgtgtataataacttgtgttacttaaattaatccaaaggtcgtaaataatgatacataatgaatcacctattaaggtggttcaccctataattctcaaggtgagaagaagttttaatattttctcttcccaattccactcctgtattcctcaactcaaaattcaactttttatttatttatctcttttccattcttctctttcttattttcactaatcttatttttctgtgttgtgccaaacagagttagtgagagtttttttttttttttcatacttaaaatttgaattcaaaactatctttaaaagaaattagacatgtatggtacatgaccaagtactggttaactaatgataatgcaatacataatataattaatttaattattattacatttaccacagaaaaggttctcgttggtttggctaaaggaagcttaacgcgagaacaatttcaaagtaggatatttcattggaaaagaaagccagttttgttcctcccctctgcctctttcctctccagcccttttatgtttggtgaaaagtttggcacctttattaatttctatatagtttaagtataagttttattcataaaacaatgatattacattcgtcccaaaataaatgccacgaatggaaaaaaaattatcttaaaataaaagtctcatggatttttaatataatattaattattctttttcactcatatctaatatatatgttattttagtttttgaatttaaatattaatattattttatttcatctatttaataagattaattttgtaaaataattaatcttaaatgacacttattttagatgaatcgatggaatactttttttaatttaaatctttatataaataattctttatatttaactccctaaaaattgctgataaaaaaatccctaaaaattatataaaaaaatatatgattttaatctccaatgagaaaccagtatttttaacattttgttaaatataatattttaaaacaaatatttcttttggtaatttttttttttaaaaaaaaaacttatttttgatgtatagccttcgcacttggagtatggaacttgtacctttttggtttttcaccctgtttttgacggaaatggattacttgtattcaggcattcatgaatatagaccgtctgatttaatcagacgattagtattttaaaagtgtttttaaaatgaaatttattaaaataatttaagaattgttagatttccatcaaacaattttagtcgtctcactgcgtacgtgaatgtgtgttcttccgacagaaaaaatctggatccgtttttaactagcacgacataaaacgcttcaattatcatcttcgttatatattatataataatatgaagaagatgcaccattccatccataacaacccagttaattaattaaaattgaggagttaatactgcgtacactatatatgtaagcaaaagtagatcgactaagttgtgtttgaaagggtgccccagatatgacaaaaaagggtagacttagttccattaaactaatgaatgggcttatcctcaaggaaatttcacataaaataacgactaaagaaatcatggggttgctttcaaatgacatattcatatataaattagcgtttgttcggatatgatgaagtatttgctctcccgtcccctaataaacaaaagaccaagccaatctgtcaacacacgaagcccccgtttttaaaggggcaccccaccttctctctcctccttccccctttaatttccttttccttcttaattgtcttaatttccttgtattctggtaatctagctaacccttttttttcccattagccatagtcatcaccatcgccaccttctaggtgggatccaggggtcaatatataatatcacactcaacacagttaccagctccaaatctcaagaaatggatagcaagttcagaaaaaacaaccacaacgttaactcatataccagtgaacaagatcaagacactgatatagctcaagaaaacattgccgagtcccctccttcttccactgtgttcaacatcgatggcttagtcccctcccccacttcttcatcaaagagaaggttagtactccttagtctttcttgctatctacatatatacctaattaccttccgtttaaaatcgaaacattacatataaggaaattaattctaggaacgaattcacaaaggaacaacaacgatatgagaaattgcatatactctccaaaatttaagattttggtattgatattgagaaattctctcttcttctttcttttattagtttgtaaacttattcaactattggatcaaaaactcttagatttctctagtgtaaaatgacaattcttgatatgagcaattctatacttctaacaacacctcgctagttagtgtgtatatatagctatggaattttgaaagggtaatattgatgggaattggttatgttgaaataagcaggagggcaatacagaaaagggtggtgcaaatcccaatgaaggagacagaagggtgtaggctaaaaggagagagcaacgccccaccctcggattcatgggcatggagaaagtatggccagaaacccatcaagggttccccttatcccaggtaattatataattccattgcattgcaacaacacgtttggttattttaaggttaatttgtgaacatatataaccgacgacaagaaactatttgctggttcgttaatttgattagtgaaagtggttgttgtttatgactcagagggtactacaggtgtagcagttcgaaggggtgtccggcacggaaacaggtggaaaggagcggcgtggaccccacaatgctagtcgtcacttactcctccgaccacaaccatccctggccaccttctagaaaccacgccaggcccaccaaaaaacctgaaccgggacccgaaccggtttcggatccggtcgaaccggacgagaagttcgcggacgagtccatggtaacaaccgcggaggaattggggtggctgggggagatggaagcgacgtcgtccacggttctagaaagcccgattatggccacgacgtaccatgctgacgtggcgctgattccgatgagggaggaggacgagtcgctcttcgccgacctcggagagctgcctgagtgctcggtagtgttccggcaggggctgctggcggagcggcggcggtacacggcgccgtggtgtgggaccacaagttgagggcaaaaaagtcaacacgaaaagaaaaaaattacaaaaactagaggtgcctgtttgacacgttcttcgtgcgccacaagagaaaaagataccagcatttttttttctagtattgagatatttttaatttttttttacttatcagtgttttcaagacattaattaaaaattataaaatatttaaaataaaattataaaaatattttaaaaaatatgaataatattatttgatgtatttgaataaaaataatttttcttttaatttttaactaatatcctaaatagcggtagcctttacctatatttgacttaattgagagtagaaaaaaaggaaaatagaagaagtagggttggggaggagtgagagtggtagtaaagttgtaattagcgtaactttgggcgtccatttcaagagcttgcattccacaatgtttgagaaagaaacaagaaatttgactggacccctatccccatctcttcttcttcatagaacaacatattagtaatgcgccgatactattaaatgccaaccaatggccataatcaacaaaatgttcgtttaaattgataacgatattaacaacacaaattctagtacgtaacaaactttttcttttttactactaaaactgatacaatggaatatccgacctcaaattaaagtgatagagaatgggttcgtttaaatttaaatggtcagaatgttatttattcgatcaatcccaaccaactcaattaaggttgagttgaaatggtttcgattgcttagaaaaaagagagtaaaattaacccaatttaattatatttaattgaattaagttataaaataatttaaacttgattcaattcaataaatgtgattggaagagaagaattatactaaaaatgattaatcattttttttcatttgaaattatcattgataaatattttgtaacaatgctaaaaactttattcaaatattcaaattatttacacctttattttttatgagtttttattattaataatattttaaaatttatcatcactctttgaaccccccaccccaccccacacacatataagagacaatcgtactgtcacatttggcaaaaaaatatacctaaatgttactcgcacagtaaattttaccaaattgtcacacggcataatttgcttgtcagtccaacgaactaggtgatagacacgtgtcagataggtagcaattcgctgggaagcctagcgaattaggtggacacgtggcagacaggtagtaattcgctggggaacccagcgaattacgtggcaatggaaaaaaaatgtcaaaaacttcgaacggttataacttttgataagaatgtccgatttaagtgtaggatatgtcaaaacgctcaaaatttagaggggaagccttgggcaactacccaaaagggagttggtctaccattttttttccaaaaaatacctctaagtgccttaaaattaagatttaagattaggatgtgtcctttaaatggtctaacttttgatagaaatgtccgattgatgcgtacgatatgtcaaaatgctcgcctctgaattttgagtattttgacatatcgtacgcctcaatcggacatttctatcaaaagttagaccatttaaaggacacatcgtaatcttaaatcttaattttgaggcacttagaggagtttttttggaaaaaatggcggaccaaccccagggcttcccctctgaatttcgaactttttgacatatcgtacacctcaatcggacattttctatcaaaagttagaccatttaaaggatacattgtaatcttaaatcataattttgaggcacttagagaagtttttttggaaaaaatggcagaccaactcccctttggatagttgcccagggcttccgctctgaatttcgagcgttttgacatatcatacgcctcaatcggacattcttatcaaaagttatgaccgttcgaaatttttgacatttttttttccattgccacgtaattcgctgggctccctagcgaattactacctatctgccacgtgtccacctaattcgctgggctccccaataattacccagcgaattactacctatttgacacatgtccatctaattcgctgggctgcccagcgaattactacctgtctgtcacgtgtccacctaatttgttggactccccagttcagcgaattaccccctaactgccacatgcccatcacttagttcgctggactgacaagcgaattatgttgtgtgacagtctgataaaatttactttgcgcatggtatttaggtatattttattgtcaaacgtagcagtacgatcgttgtctccacatataaagcgtgaaattaagctgattttttttttaaaaaaaatctaatatgaagagattttaagatagatttgtcttctttaaatgagttatctttaaaaaaattccttataatggtttccctctctatgagttatttgagtttctctttattttagtaactatggaaatggtaatttattccaattgactaaaaaaaatatcatttccatggttactgtttttttagtggtttaattaaaacttagaacaagaagacgttataaatttaattttttgtttgtaaatgtaatatatgattttttatttattagttttgttgataattaatctttgttataactcaaatccaatatcttacttaaagaaaagaaatatagtttcattaaaatcaaggatatatatgttagttaatatttgattttaccaagtaggactcagttaataatccaattatctaaggtttagttatcagtgtaaaaaagagggaggcaaaaaagatggaatattatataaaaaaggaaaagtaaagagattannnnnnnnnnnnnnnnnnnnnnnnnnnnnnnnnnnnnnnnnnnnnnnnnnnnnnnnnnnnnnnnnnnnnnnnnnnnnnnnnnnnnnnnnnnnnnnnnnnnnnnnnnnnnnnnnnnnnnnnnnnnnnnnnnnnnnnnnnnnnnnnnnnnnnnnnnnnnnnnnnnnnnnnnnnnnnnnnnnnnnnnnnnnnnnnnnnnnnnnnnnnnnnnnnnnnnnnnnnnnnnnnnnnnnnnnnnnnnnnnnnnnnnnnnnnnnnnnnnnnnnnnnnnnnnnnnnnnnnnnnnnnnnnnnnnnnnnnnnnnnnnnnnnnnncagacaaaaaagattaacgatttaaaatctgaactgtaaaatttgcatgaatatatgtgagtggtatagtataatcattggataaatcgtaatattgcatacattaaaaataaattgagtttaactcaactaactctaaaaattagtttaaaaaggaaagtttgtccaagtcttagaaaaactactttgatttttttatttgatgacgtatgatcttaacattttaatttcagttcaaagttgtgccaaagactttgataattattatatctatctttttctaccttttcattgataattattctaaactctcgtaatactcaaatcgttattaagtgtctatttatatttactgccaaactttgttgttattttttaggtaaagagtttaatgcagatgtagaagttaaaaaacacaaagtgttagcaaattcgaatatcaatattttgttttgattattgtttcaaataatcaataagtatgaaactatcagctttatttaagaaaaaaatgaaaaatgaaaatataaaataataaaaaaattatttttattatttgctttatatgcgagtgaaattaaagaatagcatgaaataaaaaaaaaattataaaatattttctctagctaaccaaattatagaatctcttgtctttttcctttttcctttccctcatgcctcgagatagagccacgagggcctatcatctggcctcatatataacaagctgggggttattgatttgcattaaaaagtattaattaaggaatatatatatatatatatatatatatatatatatatatataaagaatgactttcagcatttttaactgaaaaagtgtttttttcgtttggatgaacatttttttttcagttaaaaatgctgcttttgcaaagtattctttaatatttaattgcacttggaagactttaataagaataaaaaaaaaaaaacaaattaggtgccttttcgcctacagttccgtgtttataaaatattttttctttacagcacgcattaaaattcccttaaaatatataatcactttataaatttacattcaaaattgtggttttcttttttaaattgctaactcaaaccagccaatttgagacgtgtgtgtgcgcgtgtgtctttttttaaaagcattttatttatattttaatatgtttttattatacaagcatattttttgaattctcgttgttctaaaaatttaaagagtacccctttttttataacagtaaaactgttgaaccattaaaatattacatcgttttactatttcatttaacatcatcacatggtatacaataatataaggggacaagtttgtcacgttgttaagagaaatctttacaacctcccaatgtaagaacatataacagttggtataaaatttatttattcttagatggataactcataacttcacttcacatgcatggattaaaaactttgaattttgaacactatcagattcaggagatgcccccaatattactacagattttttggttaaaagaggtgcatgtttttattattattattattattattattattattattattattattattattattacccagtttgacctcccacacttctactttatttgttatcttgtttttttaagctctcctcccccttttattattattattattattattattattattattattattattattattagggtatgaaatatatttttatatgaaccaataaggataaggatagcattttctaaaagtggatagcgtcctttattttggttaaaaatagaattattttcgtgtaggaagtgcgggaggtcaaaagtggagagcatttattagcattaaaaanattattattattattattattattattattattattattattattattattattattattcgtgaacgttttctaggacaggcttagttcattcaatcaaagaaaaatcaaatttgcatggaacttgactagaaatagaaaatgataagaccattaccattaacaatgattaattaaaaaatataagtatattctatttttgattaataattaagatttgataaaaatatatgtattaatgtaataaatttaaaattattaaacattaaccgtttaatttaattaataattataatttcactttattatgcagtcctcgctgtcatctatttttcctttcctgacaggcccatgtgattatagcccgttctatgaatagagatagggagttactatttgcacaagcacaactgctaatggaactacccacatggatatcttttcactttatttcaaaattacccttttgacaaaaacacaatggaaatgtgattgcctttttattatgattcaattacgttattttttattcaaatacgaacgaaattccattgagaagttcaaaatttttaaaataatagaattacaatttcattggctaaaaatcttaaaatgttcttactaagtctataaatgagagaagaaaagagaaggattggggatataggaaactcagaaggataggatgatcattcctacattcttggtactgccataaaaaattgtagtagtgacaatagcaacgcccattgaaatatgaccttagtttcgaaggcccaacattatccttatccttagtaggatggtagcccattttctaaaagtggatagcatattatgattggcattgcaatagtgtttaatgatcatactctctgaaaatatacaatatttcataccctaataatataaaacattttaattataatttaattacaaattattggtaatataatttttagaattattatcataaaaaattaataaatgtactataaatgataaattataattaaatgatagtgtaaaactttttataagtatataattgtttttctcttgcaatattagctatcttttttatgatactttttatatttctttcgcacagtgattgacaatcatcagtccatcacattaagaatttttataaaaaaaaattcctaaatttccattcaaaattttaattcaattttattttttaaaattaaaaaaaaaattgcataggaaatcatattaaatccgacataaggtcatttcatcattcctttcaacctttctctttatgtttcgtcattgaaatttttggcgacgaagggagggaaatcctaaacccaaattgccaaacagaaccaattcagaggcatcattcttaaccatcattattgacacccgggaagttagtgaaatgatgataaaattttctgcgtgtaaggtttctacttctaggatgctgatacttcatgttcatttcctcattttttacctaaaagatgaaaacagaatctgacattttaaccctgatagaataaataaagagcagagttagctccccatattacgcacataaacataagtacaaagggaagaaaaccaaaggaaaaacgaattaaacttttcccatgcgattttacatcttccaccaagggaaaacagtgtgtataaagttaaatatttcatataataaagaaaagctgaaaacataaatacggattagttactggcttgagttgtcagcatttttggtcaaattttcaaccccatgtgcattctttaaaatcattcaataaataaacacgtcgtcttcattccatcttaattccatgtttataaattactcaaacaattcagccgaacatgcacaaaatttcaaatattattttaacataatacctaacatgtatgcatatgaaatataggtatgcgcaaacgggtgtcccagaaatgattagcctcatagtcacatctacacatgcttctgttctcactagcaagtaccaaccgatatggaaaagctttaggataacccacttagtagggccaggccaaattgagtttttgttcattcattacttctaggaacttcttctcagacaaaacttagatacaattctgcatgaaattttagtattgtttttcaataaagagaaatgctaccgaaattttaccatagtaactaatgtaaatttgaacattaattctaattggagaacaacattaaaaacatctaacgaagtatatataggttttttttttatcttatatttaaatgcaagttctaataccaaacaaactgaacacttggcattgaaacaccaaagaatctcaatatctcatattatggtgatcacgacctatctatgattgcatagagccatacacgtccttgtcacacttcccaacttctgcatcattagcccctcataagatttgtctccatttcaaatgctacatcactcccaccctgtattctcactatctcacatacaccacattggcgtgttatcaacaacaatatcattcaaatttttcttttaccatcatcactcataatatatgtcagagtgaaatgctagctaaaaccaacgtgccccatgagaccttatctccacagaagattaaagtccaacatgttccaaagtgtgtgtccgataggttgctagagaagttctatgacgagtcagagttcgattttgattatgagcaaagtcggttgtggtctcctccagttccacgcacggtgttcttgagctcaccgggaagaatattcactgagcaagaaatgcttgaaagactcagaagcaaaaatgcaccaagacgtggcaaaagattccgagtttgtttcagtgtacaatgataatacttcttgcttctctttccctgttccattggttcctctgcttctttcatattttgcactgaaaaattctatacctttattccttttgcaggtgttctgttgtgcctgacactgaatgtaaacaaaagtgggtaggtttttcagcaatgtttcttgttttagaatacaaagggaattaatccaaaaatttcctatgattgttttatcatattcacaggaatttacatgtatttcttttctttttctctagccaaaagtcacgtatatctgtgaatttatatatatatatatatatatatatatatatatataccaattatccatagactcctttagaaacaagttatttttaaattcgaattcattattaacaaattatcaagacacaactttatcattatattaagatactacaacttaaaatgtttttaatttgttaaaatccattttctttttcactttcgaaagatactaagatgaaagatgactagaaaacacttttgtttgggtcttttccccagcttcgggaaatcatgtttttctcaagacaacttggatattggaatagctagtggagcatcgaattttgtgcctacgtcataaaatgtttacaacctagactagcgtaaattatcggagaaaaaatattaaaaaaaatgagggaaatgtagctttgcatttgctaatgttaatgttcttctattctttctctaattaaatttttatatacacaaccttttttctttaataacataaagatatttaacaaattctaatagaagattatagagattattcataaatgataaaattaagggtgtaaatgatttggattgagttgagtagaatataatttaagactcaatctaataaaatataattaggatggattgagtttgttatttttttattaagtaaccaaaacccaatcaaccttattttaattgcaaattgggttaactaattaaaatatattttttatccttatacaattgacaatgtttgaattttgtctttataaaaaatttcatttgttttcatcttcatgaaatcatgtttcattttttaacccaaagtaaaattcaattatatttgaatatatgatgataattttttacatcaattatgcatataatcaatataaatgtaacattttttatattgattatatgcataattgatgtaaaaaattatcatcatatattcaaatataattgaattttacaatgtaacattttttatattgattattcatataacctatttaaatataacatttattacatttattatacatgtaatcaatataaaaaagttatacacatagatatgggtatcataaataaaaaataacattataatttataaaaacaaaaacggatgaaaaactttactgagacgaagtcctaactttatcaattttgtaaggaaagaaaacattttaatgataaaaacatatcgaacatgaaaagatatgttttattaacaaaaacacatcccaagtgaaagagaccggtaaacaacccaaaatacgaggagctagagatgttataaattaatttggaatgatccaatttccactccaatctggagtcataaaatccttacagatattaaggaaaaggagattatcagagtaattaagaaggaacagcaacacattattgaataatttcaaacaatttgtataagcgctgtcctcggtccggtaaccaatccacgtgcctgtattctgtagcactggatgctcaccaacctctccacatggcatgctctcaacacattttttctgataacatacaaaacagatctgtatttaaaagaaactagttgtgatactaaaaaaacaatattcaatgcaaatcagtgtgtgatagtaaaaaaactagttgtctaatattatttgagatgtgataccaaaaacatctaaagaactgtatattctcaataatatacatacgtcagtgtcaaaacaaagtactttcaaaacagtgtctcctttcctaggatgcagttttgttgtttttctgaatgattaaaaaaaaaaaagttactttcaaaagtgtgttgtgtggattttgattttgattttgaccacgatgaccataataataataataatatacagttaggcttgtctaactccatgtcttcctgtaattctcattcctctcatcagctgagagatgtaaaccaaaaactgttacatgaaaaagaaaacgatagttctatcttcttacggtctgaatataaaaattgtttgcatccctatttgatagaaggaaaaggactcatgtttggagacaggatatacatgcagattgtaagatatagttcatatctaactcatagatttgtcaagtttagttctctttagatcaaagactgtacaggtctcaaggtaactctcacatcctcaacattcatagttgaactaaacagaaacagggttttgttggagagcttccttcccagtaatgccttcttttaaatttttaaaatatacgtcatagtccttttctggaggagggtttgctggatccacagtgaatggctcactaaatggaatgacacttttgacctgcaatacatattagagattgtgtaactagcttgcaaaatagaatgagactatccgcaatcaaattactagatccatgaacacggataaacaatttatctcaatcttaaaccattacatgcagttaacccgtataaaatccgatgtgcactataattgtggtgtttcataaatagaagcagaaacagcatattcaataaaaggctaatatcactattcgagccaaagccaggaaggagcaggcttctcctctccacaaaggaggtcaccggttcaagagaaattcacattacatttagaaaacgtaaaaatactaaacaaattctgaaaaaaatatgaaatagtaagagaaaaggctgacctcaaatgttttgtcacatgcataagggctatcaagcgcagctacacacataagagcaatctcttcccttgatattttaccctgttaagctttgtattagattggcatttggaaaaatgagaaaaatgctactatatagttaccatgaattgccataagaaatcaagaagtggaaatatatcatgagataggtagtttagtaagagcacttgaaccgggaaaagcatccatcttttgttttcacaataccgtaatattatctccttgatcaaaaataagatcggcaccagcaggctcctcagttaatgcacaaggcctcacgattacatagggaatgccactttctctaagtaaatcctcgccctgttacaacataaaccacttttagcaaatgaacaagtatgtgacagggaaatataaattgcataactaaataggctatggcaagcaataaggaggttcctttagacactcttaatagagaatgaatacttcttttttataaacttgaatgacaagggaaaaaatttcatagtcaacagccactctaaaactatagcaaaactccaatcgttgagtgttgacataataactataggcacgggtggaaatgggatgagtaaactagaaggcttaagtcggaccaatttacttaatataagtctttttattaaagcctagcttggtctttataaagcttggcctgacctgaagcctaatttatatagtctatttttgcagtaaagtcttaaccaagaaaaatagttttgcagaccaaaatgaccgtgatagacatcaattttctgcaaactggagaccttaaaatctagtaatacatccatgttaaataaggatccatcatcagattttacctttagtttaaatgtgaggatataatccagttccttgtttaatcgaacggcaggaggctgtttacttagatctagtccaggcctttcgggtcttgtaactcctgctgagctcacatgtacaaacctaaatgtgacacaaaggtgtataacaaaagatttagtatatcagggtaaacaatggaggggaaagaagcacaaagataaggctatacctgggggttattgaatcctttattatatatgcatgtatgctagacactggaagctcaaatggaccttccacaaaagtttcatttaatttaccatcatactcaaacttgctgaacatgagctgcagagagttttgcttcatcattaagaaataagaacaagtgtgaaatttctaataagccaaaagacatacagagtcatgcctgtaatgatacaacaatgcttggatcaaatggtggagcatcagacacagttcttgctcgaaatacaggcctcaaggaagaaaatggcacttgaatctatgaaagacaaaagaaaaaaacacatgagagttggtattattagataatatagacagcaactattgcaatagatgatacctaccgattgccattttcctttctcagtgtcaaaaccagcagtgtaaccaagagcgtcccaatcacggcttgtgcgaacaatgattttatatctacgcccatcaccttttaggcgaaactccaaaccatcatatgcagaaagattttcaggttctgagaaattctgaaaaccaattgtgaaaactctctttttaaaattggaacttagttcactacgtaaatagtcaaagtgaaatcaaatatatgttaatcactgcaataacagctagtcataggcaggtagcaacacccgaaactgagcaataattagaatcatacaattaaacgttaataattcaactaactggaaaaaatatagttcttgaaaaaataataaatgcaaaatattttaaatgttgatatgttctgttcctccatttcatacttccagttaaatgttttcaaggggaaaagtgtattcacttcttactgccctaataaataaatgctttccttgctttaaaaaaatggttctttattatataaatttcacaagcactgaactattaaattactaaaaaaaaatagctaaagggtgatttagagtttaaaaccacattagaaggcagtatcagaacacttatctaaagctataattgaaccagcaccgcaattcaatgtttatgtccatccatcagaatttagaagagatttgggaataaagacataggaatagaatttttttttttattaaacagaatgaactaagcattgtggtcactttcaagatttagaaaaaaagattatgtcagaattggttcaaacaatattaatcaagtatgtcattcccatttgcctggccttattgaaacgttaatataaaaattgcatattaccttagttctaatacttgtaaagccaccattgtttgctgtagaaacaacacctgaactagacacacatttgtattatttcgagcagtaaaacacaggctacaaattaccccaaagtgcagtcacatgcatttgcaagaatttgacacatacctttaaaaatcccagttggtccaccattttcacccccacgtgggtcaatttgaaatgtactttcactaactccacccattaccacatcatctaaagcaccccaaggaagctgcctgtaattattgcctgcaaggaaaatagaaaacaaattatattcacaggacacatagtagtaaaactaaaaacacttgttctctcaatacaaagtacaaaccaacagtaattatattcactatagcatgttgcaagcacaatccatgcaacggagattgtcttcttctaattcagaaggctgctgcaatcagtcgtgcaacttaatgttctaagttcaaagctcaatctagtatggattagcctagtggaacatgtcttcaaaagccaccagctagctaatacacttatttatgcatgaactgtgcctcacaaccacccaacccccaagaaagaaaataaaaatcaattcagcttctacaagtttcctttttattgtcatgcacctaagttgaatttggtggtcactggtcatgcatatgtcaaaaagttagatcgggcaattaagttgaatcaatcaatcaattgctttgtcaactagtaatctaccttcaaatccaaataatagcttttctctttgaagtccaagattgtccttcacggccttgatcaaatttctcattcctatgtactccaccttttctggcgagtcaccttttatctgttttcaacaaccaataactaagaaaaaaaagcttcaagaatttcccaaatgagcttgcagaccaactggacttccaaattaaattgacaagaacaaatctgactccgaagataatgtcaacaaaagaagaatcagtaagctacctctggctcaaagaacttaattccctgcacataaataatttcattctgttagagaaaaataaatatgaagccttcagcaaacaatcatgtaacaaaaacaattaagacaagtaacaggttgatataagtcaacgttaacacatccatttctcagtgatagataaccatggattactgcataagcaaaatccaaattctactgtcttaatagagctaatggacatacttggctgtattttgctctgtctggagtgtctccttccttggggccaacaatgacagaagcagcattaatcaccttcttcacacctttaaagtattcagggatcaaagtgctatcttttgtaatgtctccaacgaccttatttaaacataaaggtaagttcgcagcagagtaagtaaaggaaaaagaaactatcactttacgtagtacactatatgcaatcactcaatccaaaaatacatataccaggaaagtctgcactgatgaacatcattttcttcctccaaatcttgaaactttaacaaatcttatacgtaaaaactggcaaagaacttcaaatgacctgaagtcaattgtttatctcttcttatgcaaacacataacttccaaactaacatctattttccatcgttgaattttaggttcaataacacctcattctcaacagaatgataactagaaatctaagctgtcaacttttgcaaaattcagagcccaattgtaacaaactaagaaactacatatttattttatcatttgcaaagtctttcagtacattaaattaaagtgactcaccaaatcaacatctgagcctaacatccttctagctttctcttcatttctaacctgataaaaattgatacagaaatgtaatgtttgttatgcgctgaataaaataattaacagaacgaaaatttctaagcttcttttctctatattttctcttgtcagcaaggtaagttaacaacaataccaatactcggactggaattcctttcttccgtaatatgtcaaccacccttcgaccaacgccaccagtggctccagctaccaggacaatatcagaagttcccattgtgttaaccacttcactaggggaaggatcagatagtttctcaactagaaaatcaaagaacttcacaattcagaaacagaataatcattagttgatccatattccataccaacctctctcttttcttcctattactctcaatttatactaactgaaaattgaataaagtgttaccttagcaggagatgggaacccattgaagaagaacagtgtttttacaaatcttccaaaatcccaattttgtctgccagcttcagctgatattgttgctctatgtgctccagaagagagtctggttgacctaagcaacgtctgaggtctaccataaatctgaagaaatggtttaggcagagttggtgatgccaaaatagtgtgtgaagatttcttacaaagctttcttctaggcaattcagagccctgcagtatgaattaaaagaagggcggcaacatgaagtaaaaatgacataaatgactaagaagtatcaaactttcactagatatgatgaagtgggtagtttcattttcagcaacaacagcaattagaatcagctagcatgaataagggatacaaatgcttccagtccacatattagttacaattcaacttcaaaaatctattttgaaattcaaccaaattgagaaaagacattcaatgaacttcccagataagtaccagtgaacaataagaataaaagtaaaatatcatattatcagatatcaatacaaatgcttccagtccagatatcagttgcaattcaattttaaaaatttaatttgaaattcaaccaaattgagaaaagacattcaacgaacttcccagataaccactgaacaataagaataaaaggataaaatcagataacttctttaatcttggcttagcaaattcatgcaagttgagtgtaaaagtgatcaaacaataaataacgagctttgaatttcttccaaagacataagagtggtacctgaaaattgagaatagatgtggaagcaggggaggagagagttgtgtaaaacgcttccatctgaaaagtgatcgtaggaatatgttgtcaagttaaggttcaatgatatgatatttacagtgcaggattcatatgaaccacaaacgnnnnnnnnnnnnnnnnnnnnnnnnnnnnnnnnnnnnnnnnnnnnnnnnnnnnnnnnnnnnnnnnnnnnnnnnnnnnnnnnnnnnnnnnnaaaaaaaaaaaaaaaaaaaaacagttcctatatcgataaaactaaaatatataaataagagataattttaaatttttaagcaaatttttgggattgaattaaagagaaattcacattttaagaaagattttctttcttttccctctaatctattctcttgttaattattaactcgttttcttcttaatgggactattaactatctatatataaaagtaaaataaaatatttgtattaattgttatcatttttatgtagtatctaattttattcatttattattctggttaatttttcaattggtatccttaattttatttgattaatttttaatttaaaaatttcttacatcaataattattaatctattttttgtttacatgaaacaactatttaagtcatcaaattttgaaattttttttattaattttataaaataataatgaaattattttaaataaaaattcataaaataattagaaaataaattaaactgagaaaataaattacaaaatactccattaaaataaaaatgatcacaaagttatatgtattgtaatatttcaaatcaattttcaattgatatttcatttattaatttaaaaaaattactttaaattcaaaaattaatatctaaaacatggcaaaaaataaaaattatactaaataattcaatacgaattttgtacaaattcaattgcatgtttttaaattaaaaaaaatataagattaggtgacttcggggagctaaacatactctcaaaatcttggtgactcctttaaaacacattaaagctgatatggttttcttaaagcaacaatgaattgtttgaagctctccgtaatactaaaaataccattttggttcatcttaccgtcacctcaaacatgctataagtcaatccaatatgataaaattctataagtcaacccaattaataaataaataaaatatatacaagattattacatgttctataacacataaagaaagatcaattgagttagatgtgtgtacctgggatgaaggactcatgaaagaataagagtcaatagagaatagagatgaaagaagagtcccctctactcaattgattattttttgtctatgttaaccatttgatgtgtgaatgattaaataacttaatagatgaggacatagatctcttatcagacatcaattgaataatccaacccatcacgatccatttataaaaaaaagcccaacactattcatcatattgataaagtgctattaaccataattaaaatgttaaatataaactctaataattacttagtgttaatccataacttcaactaattagaattaatataacatcctactcatcttcaataacattaagcattatttcttatattgaaaacagatgaataattctaatagattaaattatatatgttatgtgtaaaaatatatatagtcaactaattaaaagttaaatatataacttttaaaataattattatcaaatttaataaacttatcatacataaaaaaatataattaagtgatatcataaaaaaaaaactctttgaaattgcttgactaatattcctctttaagatgccgaagtctactttttttgggtgggttcacttttgttccaataaagttcttagtcagtacctagtgtgtttaaataccattggttttttgtgaactttatggtttactttgttatttataacttataagtaagttcatacttttgtgtgcattttttttttttatatttgatatcatatcatccttcgatcatctttcgatcgagaagattgtgtttgaatcatatggtgttgtttttaggaatgatgttacgaacaagttagaattgggtactgaactgaaatgattttatatatgtaaatgaaacttgaggaaattatatttggatttctatttttatatttaagtagagtatctgtaaaaaaaaaattaagtagagcaaaatacatttttataatatttatttttatctctttggatttacctaacatattttttgatcattgagaaataaaaaggactacaaacgcaagaaaacaattcctatggcatcagtcaaaaggttcaaaagtaaaacatcagggcaagagccaagaacattgaaggatgaatcccatctttgcaaggatatcagcacaagaattagcctcgcggtaaacgtgttaaacttaacattccaatggttgaatattgaaggggatctgatctgagcctagattgaagcataaggatgatagcttgatgatccttgctgaatcaattgaataaaggtaagagaatctatttccactaatacgtgagtaaagttttggttccaagcatgctgaaatccacggaggatacctaacatatacatacatgctcacgttaaaaaatttattacacacataagtttagaaattttattacttttactctcaatcttaaaaactgatttgatttttttaatttttttttataaaaaaaagctatctcttcttatcctatcatttatcttattgcattgacgatttgcatttcttttttaatgtcatataagataaagagcacaagaatcattttcggaaaatatttgtactttatacgttttgtttgagcttcttcaataattggtctgtaagcttactagctagctcatcttacacattcgatagtatctttctttttcgtttgttatatgaaaatcacttgaaatttttaataaacatgagttagataaactcaaataagagatcttgaatctttgtctattttttttatttgccaaactcaaatgttaaaacttaagggagaaaaaacacaaatccagtgtcacttgaacaagagctatgattaatgatcaataattctctgtagtcatttttgggtcgctacagtttgtcataatgctcttattggtatcatattgttgtcatgataatgtagttctgccattgtttatcgtgtttcaactttatggtgacatcaacccagacaaagccagagtactttcggtaattaggtaaatcatgtcccaagggaaacacctgaactgtgacatgtgtgaataattaaggcttctcggtgtccattcttcccagcaccttttccttcttttagaacttttctaaagaagaaaaaaagtatttggcatacatgtaatcggtaatcgtatccaactacaaattttgacttccctcctactctttccttcaacgtgatatcaattagcacaagtcagccatattgtcattgttattcttttatgctaaaaatggttggttgtatcagtatgagctcctcctcctggtccaattacgcacaacaatcacaagtatatttattttacatatttatttaatcgatgtaattcattttcacttgaaaatgttagaaaggtaagcccattttgaatttttttaattatcattttagatctccaatcaaatttaaattcagctcgattttcacccatgtgaatatagggattgctaattttgtagtgatcattagcatcctttatactagtagtattttgtttaagacaaaaactcaacacaaatttcatttgaaaaatgaaaataacttaatttttttttattttatagtcttttcctttataccaaacaatgatcatttttttaaatgtcagataaatcttaatacatgcatcaatcttttctttttattggaaaatctataaataaataaataacaaatttaaaaacttaataaatgtgttttcaatcaatacttttgtaaacatatgtataactacagtcacaatttactttaaatatatatgtacaactaaactaaatccaacgttaataattaccgtcactataaatatataaacttttaatgatgattttttttcttctaaatcacatatattttttattaaaaacaattttatttgagtagaataaaattattataaactataagattcttcattcaaatatttaacatataactatatgttcaagactcaaatatgagataattaattaagctaaaataagcaactccaactgcatcaacaatctatacctaaaactaatgataagtgacttataaaagtaaacatgtaaagtaacaagtatatagatcataaaataatatattattgaatggcataagagtgaattacacacatatatatatacctcacttgagttctcagttttgaaaaccatgtcagcacttaattaattacaatgataggttggggataacaaaattatccatgtattatgtgtaccatagtagctaggttcacacacacaaaaaaaaatattgtgtaccatacttactagcgaatatttgagaggaaattttttcttacaagctagtagaactgtagaagtgagttttattttccttatttattaaatatgtggcttaatagatatatctaattaaccttcgtttccatttatatctgtttttttttccttcagtttttgttcatttttttaattattctgctatggtttaatagatatcatacatactcattaacacattaaatccatgaaatttatgaaataacttaaagctagtatttatccggcaggaccgaaacttctgaccgccccccgctaaacttaaaatgctgttgcagttgcacacggaccacgcccacaattatagtcttgcctacttattttaattggtaaagtgatttcaacctttttgaagaatgatgatcacataattaattaacgaaaataaatatatgacacaattatctttaatgtaaggaatacacatcattttatacctttaatcgactctttcttcattataaagcccatcacatgttttggctccttacttgtttattctatatttaaacgtacacataaaacacgtacaaaagattaccttgcatattatagatagtatagctagttttgatcgagacacacgaaaaaatggtatttcaagttttgaatacccgtaatccaatttagtatgttttcaacccaaaccatacttttgaaaaattaagttaaaccttacgaaaaagtctcttgctgactacgtacgatcataaagacatgattaaagagttaataaaaaattaattaaaaatacaatgacaatattgcactagaaacatttttctaattcctaaatttagatatttcaacttttagttgccataaaattattttagttcccgcttatttttgtgtgtttttttaaaaaatttattattagaaaagtttagttaaaaatgaagtgataaatggagagccatcacctcaccgtgtcattacttcatggagacataatgactacatatttttggaactaaataatagttttaaaagtactgaaatacctaaattctaaaacgaaaaacatgcttaaatctttttaattttttattcagacaattaactgtaagcaaaaaatgagttttttcaacgaaagaacaagagcgactcaaaaaaacaaaagaacaagagacaacctgccggctgccctaacctaacttagatcttccacagtctgtactataaatcaatatggcttttttatgtatatttttttaaactacaaatcactatttaaaagtcgaatcagggaaaattaaaattaatggtnnnnnnnnnnnnnnnnnnnnnnnnnttttttttgaatcaattggagttagattgaatatcgtaatacagaatgttagaattttctttttggtaatataaagttaagccatttatcactccaagtcctactctcgctaaaatctaaaagattacaagaataacaataatttaaattcatgtattaaaattaatataggtgtaattaaatttagttattattattattattattattaatagtattttcaaattattttacaaaataaaagtagatcaatataaagaatatttattacattagacataccaaaattatttatctaatggactactctttagaaaaagagtccaatttgacaaataaactaatatgttggtgtccaatgactgagacccatcatttgaggtttgagcaatacaccattgagtttgagaaccttcaaacaccagacaaaactataatacatatgtgaagcatagaatcatagctatcattctattagaaataacaattctgttatgatttattaaaaatacatttttcatgctatgctatctcatgtagagaatgttatgataaaataaataaagaaattatataatagagtcatgagtatactttctttaacttttatcatccattcatttattttacatatnnnnnnnnnnnnnnnnnnnnnnnnnnnnnnnnnnnnnnnnnnnnnnnnnnnnnnnnnnnnnnnnnnnnnnnnnnnnnnnnnnnnnnnnnnnnnnnnnnnnnnnnnnnnnnnnnnnnnnnnnnnnnntaaaacagataaaatatgtagaaaatcgtaataattctacatctattttttattttcttttttaaaaccagtagaatacgaaaaaaaaaagttcatcaaaccattcaagtcaaatattttgatagtttaaaattgtcagaaatcatttttcaaaataaataaataaataaataaattttgacttaaaaattgtgaaatcatgaacactttgataaaagagggactaaaaataattttccaaaaatttgagagactaaaaataacaaattatatttttaaggattacaaaaataatcatccaaatttaaagcactaaaaatatactgatcaaataattcacctctaaagattagtattaaaattttaatattaatatttttaaattactaaaaccaaaaaagaaaatatactatagaaaaatgtcatatattgtttatataaaattttttacaaaatatctaattataatatatgataaatttattaatttttaaaataattattttaaattaattcaaatataatttataattgaaagaaaatgtaatattttagtgcctaaaaattaaattcaatatactatctaatacatattcattaagataaattcttaagagatattaacaaattcctttactttatatgccgagtgtggggcttgtaacatttttaatatatgatcaatatcttaatttactatagacccacctacattcaatcccaacaatcccattccacatcctgtctgaatcacaatttggattttcaaaccccacgcccactttctcttgactttagccatcccttattccttaaagctagcttgatctccaagttctctctctctctctcgacccacttctccatttccttatataatacaataactccctcataaagccattccctcactctttcacaatatggcacgacctagcacgttgctgctcctgttgatgcttctcttggcttcattttgctcgtgtttagaagccagaaaacttgttctagagaagcagcagaagaaggaaaacccatcttcaagaagggacagtttgtttctgagtgcacttcctaagggcaccgtgccaccttcttcaccaagcaaaaaaggacactctatggaggttgatgagaagctcatagcacgacacttcatagccatcgatcgagttcttctaagatctgtccctagcccaggtgttggccactaataaattaagtttgtgtgtttatttatttcttctttaacttctttcttgagatatgacaccacattttttttattggttcagttttgttattatgtggcaagattctttatatggtggtaaagaggattttgaaagtgtgatataaataaacctacggaatagtttaattgtgtaaaagtggaatgaaagaatatatgtgcttatgctttcctctgctttgggactatcggctttccttttacgattatactcattcacaaacataaataaatgaatacattttgaactttacgtcacttcttttttcggcgtacttgtaagctttgcagtttgcatcaacgttttctcaattggaatataatattatgtgccatttggaattggaacagagagaaattgttgatctgctactgggaatccagggataaccccatttggcgtcatacaaagaaattagaatacaagaaaaaaagaaaaaagaaagaaagaaaattcattccagacaattctttgtaagcttccacttactttttttcaccaagagttggtgcgtcaagattcgagggtatctgtttgacaatcgatgtttaattattatcaaggcatagcttttcttaaagtgtggtttgtcttttgtattaaagtgttattcatacgcacaagtaaaagttaaatcttgtagtcaatgtgttttaaggcgtctaactatatatatgtgttggtacttacttgtgagttgtgacttggtgatgatctcgttaaatggttagagattgaaattgcctatatatacttttctccccctttccagtctctctaattaaaaagcgacacatgattaaaaagtagagtttttctcctaaattaactgtaacttatttttgttgatatgtcactttcaacgcaacgtcaagaggctattttttttaaaggaagttaagaggctatttcattgacataaccttttgatatttatttcaaagcaaatgtctttactaaaaaaaatttatatgcaaggcttttatgacacaatttatgggctaaaaaaacacttatattaattttgatcatttaagataaaatttaatgaataatgtttatttttactactaagtcgttaatttaagtagtattggagtcaatttctttaaacaatgtttaagatttgaatcttataaacgaaaaaaatataattgaaaggcaaaaatttcactaaagatgtccaatcaaattttttatgaaaattaatcatcaataaatttagtgaatattacgtaccaataacatgataaacaaaaaaaattacattcatttctcgcacacataaaaaaaatgttctctctcacattttcttaattcaaatgactaaatatcccaattcatgacactcaaatattattattttgactacaatgataataataatgaggatcaaacataattgttcatgcatttaccccaacccttcctattaaactaaccttagtgagtaacacctaaatattattattaacttcatttttgtttgtaacaacaatatctcaatagtttaatagtagttattacttgtttggtaggataccttttctaggtcagtacctgtgttaactttattatttagattaaattactcaatacatacctcaattatttgtgaatttttaagcaagttcttgtacttttttttttgttaaattggattcctaaactaaaatactagggtcttggatttatttgttagtagtttaaaattgtcacaaaatatgacaattgatgatagtttagaaactaaagggactaaaaaaaatgggggacctatttaaaattttgcatataaattagagattnnnnnnnnnnnnnnnnnnnnnnnnnnnnnnnnnnnnnnnnnnnnnnnnnnnnnnnnnnnnnnnnnnnnnnnnnnnnnnnnnnnnnnnnnnnnnnnnnnnnnnnnnnnnnnnnnnnnnnnnnactttatataacgtttataattgagcactacggcagcatttggttaagtaatcaaggctatgcttattaaagtaaaaacttaacatacactccagtcaaaacatcccaatgattatgctttgaatcattactccttactcctatacttggaaattaaaccaaatgataatgaactgaaagagacttatccttcatttattacactatattacaataacacaagataatttacagttgacatcgctgataacagaagaaaaacacagaaattgagaaggtgtatataccaaatgttatagtactataaattctatgaagagagtctaacagagcacctgaagcatccctactcttgagactaaatgtacaataacaacttcaaaaaatgcctaattacacaggaattatgaattaatactttggtatcctcccctccccccccccccccccnnnnnnnnnntatatatatatatatatatatatatatatatatatatatatatatatatatatataatataactaacagtccagaaccatagcgaaatgagtatctcccataatgaacacaatagttatgctgcatcaatttttttacttcaagaagagtaggacacaaggaactttaattcgacccggattgtcctagcccttacgcatcgcaattgaggtataattgtgggagaattccagtaccaatcccatcatatagcacataatgctgatcaatctcttactatggtactttgaaaaaaaattcttataccagctgtaacacttagacaaaaaatttcatggtacaagtgttataagtaaaaagtcctttggattaaatgccagatatactcaatttcagaaaacatggtaggtgagatcttaaattttaaagtacaaaaggaggaagaaaaaaatagtcttggatatggtccatgtacacaactactggtctgccacttaagttgcacattttggccaaaaaaacaatagcatcagaaaagactaaaaacgcgtccaaagaaccaagatatagcatatcctcaaccagcacccagctgtttttttttttagaaggggatcaccgtcagtggcctgtgttttgccatttgcacatcttctgacccaacactcttttcttgttggagtaattgcattatcattttagcctggcacatcttctgaaattattactaaaagattaaaaattacaatcgatcaattaaacctattacattccaaaggtaattttataatagcatccaagtaaaatcaattattctaaattaaattttaaaatattgttctgaaataggaatcaatcttttaatattacttttatattaatcattttaaaatattaaactgaactaaagaagcattttatgaagataaggggaaaaaataatgaaaatgagaatataaaataatgtgtgcgtctcacttgaactatacgtttaatttatttgcatccatatgtattggatgacggcagaggattgaatcttctacctaccataacagacacctcacacaccggaaacattattaaaaaatcagaaactacatgattcattagaagctcgacgtatgtcacacgtacttgtgttccaattagggatggcaaaacgggtctggcccggcgggccagcccgtttaacccacgaaaaaatgtgggctgggttgagactttgagcccacattcattaaacggggcgggccaacccggcccacaaaaatgtgggccaaatgtgggccaggggtgggccagcccaccgggccagcagcccaccaataaaaaataataaaatatttaataggtaattaaatgagtgacttagagggagagtgactaaaaagaagttaatgattttgaatccttaaccctaatacatttttatttggaacctaataatgagctatactacatgtacaattatgttttgatagtctgcatcattgtgaagcaaatttctaagaatttgttaagacttaggagctaattgaaaaccattgttaaacatgtatttcgtgcttgcttttacttctattaggcatgtattatatattaaaaatcattgttataggattaagttagtacattattaatttttagtataaataattacatttgaatttttttaataatttattttacctttttaaaaaaaatatttttttttatttttaagtgggctggcccgctggcccactaacccactttaaagtggggcgggctagtattttcagcccactttacaaaagtgggccagcccggcccgatccacttttttagtgggttgggccagcccggcccgtttttgggtgggctggcccactttgccatccctagttccaatcctacttcaacagtcagcgttctcaatcacacgcaacaaatcacttcacacactgcgtggataggtccatccttataattatagttatctccactaaatttctctctttcagtctaataatttccaaggttcatttttattattattaagatgtcctatgtcatttgcaatatagtccaaatattctttataagacatggatccatttttaatatgatattggcgctaaccaagctgagtctccaaaagttgtcaaggcccactcagaattgggtctctagaattggttcagctgcgtcttcaggacaacgaggattgaggaggaagaatgtaaaggatacatgagagactaaaacatcttgcacttttattattgttttcagttgtgtctcattgcattccaaaaagtcttacattttggattggacttttcaaaatacaatggaacctaacagaaagcaatagtgaaaatgcaagaagcaacatcctatgtacatgagaggtacttcaatgctaaagttaatgtgtaaaatgtgttcatcgacaacgatgaaaaatgcaaagagttgaggtgaaatgtgttcactattaactatcaatgcaaagagtatagagaactcacataatgttgaaccatgcatacctatgaaaaatgagagtagatagaactcacggaatgttgacgcataagaatgatgggaataaagaaagctcaaaaaacattaaagcataaaaacaatgagagtagagagaactcgtagaatgttgccattgctatttgctaaccttgagctcacagaatgttacacttaccagccttgtttgtattcaagcttaaaaaaatatttactaggtaaaaataattaaatactaaaaaggtaattaagaagaaaatagtaagatttattattaaaaatgttaaaaaaatataaatcagatgaataagtattatgtattgttagaaatgttacaatatataacaaaaaaaacgttagaaatttgtaacatttgcaacatactacaagtctacaatatagcacatacaattaatacattctattatgtatattttattcctttaattcaataatataaacaaaggatgcttgctaaccttgttttcattagcgaattgtcaaaaagcacgagcataatccatcggttcaatttaataacgtaaatgctctaatataacaaaatagatacatatatactattgaagcaatatttcatnatataacaaaaaaaaaaaaaacgttagaaatttgtaacatttgcaacatactacaagtctacaatatagcatatacaattaatacattctattatgtatattttattcctttaattcaatagtataaaacaaaggatgtttgctaaccttgttttcattagcgaattgtcaaaaagcacgagtaaatgctctaatataacaaaatagtaatagatatattactattgaagtaatatgccaagtggcccattagctcagttggttagagcgtggtgctaataacgccaaggtcgcaggttcgagacctgcatgggccaaaatgattcttttttcgtttttctgtttgtgaattgttaagcgaggcatacacacacctttagccttcacggggttctttcatattttttcttcttccagtaaatcaaacttataccagtaaacatgaataatcttaaacatgagtgcataaaaacaaatgatcttttctcaatataaatttttatttattaaataaaaatttacttttaaatattgaaaaatattttttttctttgaataatattttcaaaatgttaagttatgttggattggtggtagaaaattaaatgagattgattgaaaaataatgggatgagatggattgaaataaaaacatcattttattgtttgattttttataatgaaacaaaacaaaaaaattattctattatttgaaaaaatgataaaatggaatgaattataacttttaaattcatattattattcttatactaaagatacttataattaaataattttataatctagaaatattgttctatcaagtgcaccccgaattgggggcgggaggtgggaggattacggttaagcagtgtaatagatcatgatttatcttcttctattatgttttattcctatttttacaaaccaaacattgtttgatttgaaaaaataaaattttattttttaattataaaaatataattttattggttatatttttgtaattaaaagtgataataaaataaaatcttaaatcaaaccacaccctaaacttgtctcatttaccaatcccaactcccacatttatgtctgccaatgtgtttgttttagcagtccaccagtacttctacaatgcactcgatcggctttgtatttgctaaacccaaagacgtcccatgccatcaagaaattaaaaacacacggattttgtgtttcctcatgaaatgtattgtcaaagaggtttccttttgtcatcatggtgtcaaaaatttgaacttttcttaaaggtatgcgaaggcattgattgatgagctctttagtatttattagccgggtctgcccccaaagtgtttggtattaggagtgcagatcaagctacgaataaaataaaatatccaaattggccgggaaacattcttacccaattgcttgagaattcctacttactctatgttaaatgttcaatgcatgctcaacttttacattaaaattaatttgaagatacggatgattatttatatgatatattataccgagaataaagtttctctgttgcccccttggatcaatgatgcgatcacatatcttggctatcagatgcttaggatgcatagagattatggggcagttatttttttttcatcttcaaggacacagattacggtcggaagtaattttttttgtatgatgcaaaaaaaataaagatgtttagattgatctcattaattccatggtattatgatacaccttttacaccttaccaacacctcttttcttcccaattatactttaccgtcgcttcattttatttctcgtcgacccttcatttatagtctccaaccacccctcctaacaccacccccatcattgtcattattttcaatatcaaaactggtgacaattgatagtagtagctacggtggtggagaatcaacgatgtcttgatggtaacgatgtttgttgatttatagatttgagctcgaatcgtctgttgatagtgcatggtgttcaacggtggtgtatcgacaaggaagagcatgatggtaaaactaacgtgcttgagcaagattgcctcccatcaaaacccatcacgaaagcaacaaattcgccatatctacggtgctccacgccgaccaatgccacacaccaccacaaaacccaaactcgaggcaccaccacgaaagccaaatgtggtgtaccaccacaaaatactgtttgacaagatcttttagagatttgccgccaatagacacgaagtggtaatgacataacggtagtttacatgacaaagtgaattgacacaacccagatcatagagctctattttttcttcttcttaaatatggatttgatttttctttctcttcatgttgtaatagttctaaaatttctatttgtacaccatacacaagaatatttacttttccatcataacctgcgccatcttcaagttgttttttgcattgtaatcttaaaagagaaaaaaatcctaaaatattataaacaaatttataacaattttaaatttaaataatatctcaaagataaaataagatttgaaacaaataataagttcttaaaaaataaattaaattctttttctaaactaaaaatacaacactatagacatccacgatcagattcctttatatatctactaaatttgaaaagaaaaaaaaagtttattccccaattacaatagaaaaaaatgtttattgggattgtgccgtggtgaaagtgagtgggtatggaaacgacagaaaatattatttgctacacgtaatatctaaccctgacatgttgcccatctatctcgtgaaccagagtaaaaaaaaatccaagtactttctacgatcgagttacccgaaagaaataagaattttccaagtttcaaacggatacttataaatggtagtcgtgttttaccctaatcacgtgagatatatctgtcagacattgcatgaacaatttaaatattttttgttgcattttaattatttaaattcttttaaaaaattacattgattgcatgaacaagtctgtatcatataatatttgtgtcctgatgtatcgtatccatattttcttggactgttgttcgtctataaaatgaacaactctactcgttatatctaactatctattacctcgagcgggacagctgaaatattttaagatttcagctgtgtttttttttttaagaacttaatctttatatattattctatattatcatttaattataaattattatttgaattattttaagataattaatttaaaaattaataaatttattagaaatgatgagtagttgtgatgtgtaaaatttttataatattaatattttttctttttttaaagaaacatgttgtttgagaaatcatcatgtaggctaattaggctgtgtttaaaggttaattaaccgcatattttaatgggtcaggttttgctttttactataaaaaaaaaggctttaatgggtcagattactagcaaattaagcagcatataccctaattatctgctatcagatatgaattgttgcaaagtttgaaccgatcactgttccaacagccagtaagtttatctttgacaaaaatgtatcgcaagaagaaacaaatctgacactcaaagcttctcttttgtggggcccttaaaatctaattatctcctaccccaccacgctgattctctattcctagatcagattaatcaagatcataatattgctagttgctaccctgttggccaattgacatgtgggtccaaaatggctatgggtctgtgctctttctgctctcacatttacttaatgtacccatcctttgtggctcccctccacagacttatcccacgcgcctccctgttgtcattgatagtgaagtacttgattggctcgtctctcccattgcatccctggcccatcatcaatcatgcacacaaggcaggcttaccttagactcaattttctatcaaatggaaggttttgaattcaaaatcaatcattaaataggtgggaactagtagtaacactttcctttgggagtgactaacgaatatgactaattaagtgcgtgttacgtttttttttttttttgaaaaatatctaacaagtttaagtataattttgttttttctgtaaacatatactataataagtatgaaatatttaaatatttactaattttattaataattattttgtttgaatatttaaccgatcatttttaataaaatcatctttcacaatcatattttttcattcatcaaatttgaacataaagtcttacttaaagattttaaaattctaattgaaaaccaaacatgttatcataaagcatggctgagtttgaatacctaatgaggcaaagtttagttttaaaaggaaaacgtttcctcaaatgaaaccacttcctaagcaagtaacggtgtaggtatacattctcatttattcatttcaaaggaaacatatccatattgaaatatagacaaaatttagataaatctcttcattgcttatagtattattctcttatgaacatcataatgtgtactcatttttatacttacaaagacatgataaggtagttaaaaaataggacacacattatgtttttattacagaataataccataaacactcggcggaaccttatcatcaaaataaccacaaactttaatctttactttatataacgtttataattgagcactacggcnnnnnnnnnnnnnnnnnnnnnnnnntctcaatagtttaatagtagttattacttgtttggtaggataccttttctaggtcagtacctgtgttaactttattatttagattaaattactcaatacatacctcaattatttgtgaatttttaagcaagttcttgtacttttttttttgttaaattggattcctaaactaaaatactagggtcttggatttatttgttagtagtttaaaattgtcacaaaatatgacaattgatgatagtttagaaactaaagggactaaaaaaaatgggggacctatttaaaattttgcatataaattagagatttnnnnnnnnnnnnnnnnnnnnnnnnnnncccccccccccccccccccccaagtaataatacagaaaatgagttgtcaagtattcatttaatcctccttattatacattatatatttcataaatttttctaaacatttattgtatatacttgacaactcattatgagtattatactcataatattaccatgacatgggatacactaatacagtaattaatactaataatactacgtattaggaagtagccggagaacccaccagagagaggtaaacctgactctgtatcactgtcttagcgattttgaaacccggcaccaccgtgaaacccaccctaagctcgccggagctggaatcagaggattccccggaaggcgaaacgggttcttcggtgacactctccatgtacacctcagagaacctcgtgttcttcttgatttgaaagacggtgacataattatcctgaaacgacaatgccaaacaatgcagggtccaaacgcgctttgccatctctgcaaacgcgacgaagaaagaagaatctgggtaccctccagagttcaccaccttcctctggttcaagttgccgaagaaggaacactccattttggcgtgcaccacttgaaggtacttggatttcaggaacttggagaaggaagagtttgggttgtgggttaagtactgttttggattcaacgatttgagctttttgaatttgtcaaagtagaggctttgtgctccttggttatgtaggattttgtcttcttggacgttgaagtttgggttgttgaagccttcaaacattgttatgcaaacaaatgattcaaacgcgaagatttggtgagttggtttggtgaaaaccgcgttaggatggatgaacttaaccgctgcttcgagatcccaatgagcagattccatttccgccatcataatcttggagaagcttctgactgatctcaaagtgtggtgaagaaaatgaacaaaatgtgttggactcaacgatgaaagtgtgaggttatcaaacaacgacaatgagccactcgagttgagtttcttttcaagcgatttgttgaagttaacacagtcgtcgaggtgtttcttgagcgatgagatgttattgtccttgaactcaacctcggcttcgagcctcttgatggtgatttcataggttttcatgagactttgttgttcctgaatctccgcgagcataatagtaacttgaggtgagagatcaagctccttcttcaagaacctgcgcttcaactccgagatggctcgaagttcatccaccacggcttgatccgcagcttgaatggagtcgttgttgtaagggtgctgagccatttggagttctgcatatgctgctttgatggttgtgacgccagcgaagagtctcgcgattagagcctccataactgctctattcttgttgtttccttggtggggtttgttgttctgatcggtgaagcgatcctccttgactttgaggtgggagttgagcatgcaaatgccattgtttgatgcgagtttcgttgcacttcggaggcttatcaccttctggaacgtctttgccagtttcttgctcctaacgttgagtgctgatttgggcttcatggtttccatctcaagacaaatattttcttgtctgaagaagcataagagttttgtgtgttttcacagcaaaaattgatgaaatccaataacaatgggagagaaaatgtttgcagtagcaaaaggagattttggttggaaaagcaggtgcaaatctttgactacaacactttcaaatcagagtctttgagcggaggatagagattggtagtgtggtgatattaatatataaacatagattttatgaaaataatgggagggagattaagtaaataggagtgtgtttaaagcgcgggaaaaggaaaaggacgaatgctttagctttctcatgaaagatgttaaatactccaaggtaggcttgtagtacaagaactttgacatacaagccactgattatctattttttcttttctttgcctacttgtttttggaataatatatctgtatagctacccagagagatgatagtgtggggcatattgccttaattacgtgattgatgggtatgatctaattgtggaccctattagaattcaaaatattgataaaatcataatatatcgtatgctaggaaaaaattataaataatgatatatgtttttattaaagagaaaatagaaaacacacaggcgaattcaaaaaatgtgtgattatttgttaaacatgttttatataaaattaagtgactgaacgtaaataattaatgtgttgaagttaagttgaatcatttgaatattatttgagttaatttttgataaaaataattgttgatcaaattttatttaatttttgatcaaattttagattaataatattttttttcatgatgaattagaatattaaaaaaaacatattttatataacaaattcatcaattaataataaaagtctattaattaaaaaaattataccgttgcaaacttgcaataactgtgaatctgtcatgcttgtgactgatggaggacattatgaaacatgtgagggataggaatccgggagctgttgttttctaatgttcgtaaactagaaggtagatgcatgttaaatatctttttatttgatttggaaaagcaaatgatggttaagcgcgcactctgcaataattaattatttttgcttatgaaacaatggtaatcaaagttttgaaccgttttcgtttttcattattccatatggcaccgcaacaaaagtttcaattaattattggaactggttcattgtaggtatgtgaacatgaacggctacatttgtgtagctaagtagctagcctgaataaagtttaccattatccaggctttatgttaaaaatataaaatgcgtactacagatatagcttttatttgtgggggacactatagtcagaaacattattgtggtttccaaaaagctttttcgacggtaataaaaactcacaagggatgaaggaatattacgtaagcagcactgcggccagcagcagaaacagaagcatggaaaatgctctgcatacattttcttattcaatgaattcaatatcacaactttttaaaagtaaaaaaatgaacaacttatgtaaaaactaaaatattattgagttacatttcttttggtacatatgatcaatgttgtctatcttaattttacgagagaaattttaaatataattattataagtaatatttttaaaaaacatttaatataactttatatattgataggaattctcttcaattaaaaaaacatcatattcatattataagtacgatgattcaaaaaaatattaaatcgaagtacaaaaattctctaaataagaattgttggatcatcacttgttcaatgaatagatataataaaaaaaaattcaaagaaacgtttatccttgatcaaaacaaagataaactctggaaacttgaaagaatgaaaattatttcatttatttttagacttacacttgtaactatttattaagttgaaataacattgtgttaattgattgtgcatttactagtattaagttacattttcatttttgcaagcaatatgatgacaagtttggtaatttaaaaaaatgttttttattgtttaaattattttagtttaattaatgattttaaattcaaattcgaaatttgtaaattaaatattaaagaaaaacattatcatctataatacttttatctaagtaaaagttacatgtaacatatggtccaagtcaaaatgggcaagtaccaagcagaaaatgttgacatgtcataagtacttcgaattcttttcacactaagatatacaataaactttttcgtacaataatttgggttataaatttaaacttcaaaatcattgaaattaatgaataaataaaaattaatttgatagtttctattacttattttcatatgttttattaaaaaattgattaaaataagccaatattttgttataatttaaaataaatttcagtaaacccttccaaatatcactgtttgattttcttttcgtggattattatacttgtttggagttttgctactattaagtattcagagtcattgtctttgctggaaaatactgtgtccaatgcccatgttccgctcaaagcgcgaaactctttgccatagggttcattgtccaatgtccattgtaggcatgtgatcaaagaagctgagcacgagagaagcagaaaataaattgattgtgatgaaaacttttttttttgtttaaatatatatagttgatttttgaaaatattttcagtcaccataattttcccatgaccccttaattaacactgttaatattccaagaaattgaaatccgtagtttatacatagaaagagtcacgttttcttttcagttgtttgagaggagctgtctcttgtgtgtcttcgaatgcgtcaaatgaagaagagttagactttttcttcatgttttcttaataattgcaaaattgttgacagagcaagaaaagaaactaaacgatgtgcttccctttttacgtgaaagaactttggcttttctttgatcgcgatcattgaattaaaatgatacaagattgcaaatattatatacactagtggaatcttgtcttgtattggaattgcaattaatttcaatttgatatgatattatatttttctttagttagttctacttagctgtagttcatgaatcccactgaagttgacaatatgggaccaaggttgcacattggtgggaaaacatcacaaaagagacacagccgaaagaatgatggtgactgaaatatagcctcaggtcttaattaaacttacaggagatggggtacaacatagtcaacttgggacagtaattgtaacatcccaactaattaattaattatttatttgttttattttaaattttattattttatcctttagtcttttaagaaaaaaaaatataaattgagataagaacaagaaaaactaaaattttacaagatcatgtattagtaaaaaaattcgtcgtcataaaatttacaaaatataaaagagtggtacattagtacatgtctctagtataaatatacaagtacaaatttcttttccaaaattctcaactataatttatatattataggacttcaaacattgttatttatacacaagagtcacagcctagtatttacacatagtcttcggtactgtctctgtcactgaaaactattatggggtctgtgactgggtttggatacattggtacaaactgagagaacggatctgcagggttaaaatattcactaaacaccgatactgaaaaatgggtgccaaaataaatatgagcacgcaacacaggttgcatggtaactacatagcagttgcggacttcatccatataccaggcgatatccagagcatcaataaagattatgattgcagccatctaaaacattaaataaaatctaatgagaaataaatttctcagtaggctaatctaaaccaccaaacacgttagaaagttagtaaataaagcaaatttaattcaacatacattttagcagattagtaaataactcaatatatttgaatgaatgcatgattatatgaatgtatggaaatgaatgtaattgtcacaggtgcacatggtctctacatatcgtactgtatgtagctacatctcgtactggatgtagacgctgcgatcgtcttatgcaaacatgcatgaattcccatgtagtagcaccagataagtagcatatgcccagtttcccacatttgaaactcgggtcattctcataacttcataagatatttctctttcataacataagatagatatcattttatgcatcgttcatgtaatagtgtatcccagaataaatttaagagctgctaatgttatgatatatatatatatatgtatatatatatatatatatatatatatatatatatctacttatttttatatatatacgggaataaaaccggaaggatctgcatggcataatttatacgtagaagttatcttaaaatcggagtggtagtattcttatgacgcaaggttccgagataccgatttttgtttagtttatgcatggctcgtagagttgagtgccgaggtgcgtgtaggggtccggggtacatgtatggtgagtggccgaggtccgaggttcatgcttggtgagttgccgaggtctgaggtacaggcatggtgagttgccgaggtctgaggtacaggcatggtgagttgccgaggtccatggtgagttgccgaggtctgaggtacaggcatggtgagttgccgaggtccatggtgagttgccgaggtccgaggtacaggcatggtgagttgccaaggtccatggtgagttgccgaggtccgaggtacaggcatggtgagttgccgaggtatatatatgagatcggcagggccatgtggccgggctacataggtgaccgagatgcatggtggctgaagtgcataggtgggtaagtataatccggcatggctgaggatcgagatgttggcatgggttaagggtatgaccggtcttggtgctgcagccatatatattcgaacgggtatggccgggcttgaagagatgctatccgagttacaagagtgcataaatagttgggatgagtgaatccggaaatgccgagatggattgctcggctcggacgtgcatatactggtgagtgtattttttccggtagtgccaagatgtgtgcatatatatatgtaaagaagtgggtgtttgacaagtgagtggatccggtggtgcagaggtgtagagtaatggtgtagctgagagtgtagtttgccaaggtaatggtgtaataagaaggaaaagccgagatatccgatatatccgaggtgctgtagtgtaaaggttccaaggtctctactaatatttaagcctcgaatttacgtatgtatactattcacctttacttggaaaagctaggccgagataaacaaaagttggactttgcttttggtttgtcattatataaatatatatatattacttagctattacctttggtgccgtgtttaaaatttatggcccggtagtactatttctttaatttaaaacgttagatgcttaatataatattattatcttatagacccaaattactaataatttaagctctacgttattgctagcttttaaaaaaaatcactgcatcctatattacatttctaagcataattttctaagttaattctggttaaataatcatctaaatgaaataactgttaaattaaagattgaagcctagcctaccttggataaatttgatgaatgacttagagaactgccaggataattttgagagagaaggattttacttaagagaagatggtagagaaagtttgggaagactggaagttgttagtgttctatgtatagaatttgatggatgcaggagtatttatactaatttatttggttgaatgacaaccggtaagatttagtttagttaatatgtaactaatttttttggaagatttttatcaaagttaatcattacattcttctcctcattaatgcatggctttacgtggaagcttgatggataaaatttggttctactgatgacacttggactcttaaaagattgtattaaggataggtttcagctgaatttcttcacgtggctggagttgaatactcaagtttggttcttattctaaaaattatctttgatattattatctattctgttattatatttttaaatcacatatatatacatttatatatatttgagggtattacagtaatggtttataataatatcattgctttgtctttaaaatgatctgaacatataactaacaaatttgagttgtacaaaaaaaagtatgatcatttatcacttacatttgactttaagctgaactgtggcgaattaatcttgaatataaagttagggattatctaagacatataactatattcttttacttggattttggagaccagaagatgatagaaattaaaattttccttttatttgatatttaatgtacataactattttgaagaaagactatgaggcccaaatacaccctaaatttatcaagtgtttgatccatctttaatcttaaaatttcctgttcatattaggcacactccttgcaaaaataatgagtcatcataaggtaatgttaacgagtgcctatatcagtttaacatgttaattatttcatttttattcttttttctggagattattgtttttattccttaatatattaaaggtactgttcattaaatttttaataacaataactaaaaatcatagcataaaaaacagtgtgtccaaaatgtttcgctatctaaatgtttactctatgtaactattagattgtataacaaattggaatgttggtgaacacggaggtagtttaatgattcagcaatgaagccatgaaggcatggctttaggtctaagaaaaagatgtaatgcctcaaaatgaatgatattcgtatgtttgtctttaacatctctcaactcattcatagtaattttatggtcttcgtcacgtccgacattcaagttataatattgcaggaatattattagtctaacagtgtccaaagttaaaattatcgcatcttattaagaatagacgaagaagtttcctaatactaattattttatcttttaagatccgtttccacattatattatctgaagtttaatatcattggttactggttagattgttgtattgcagaaaagtgatcgaggtccaggattcagtcaaaggcaccttgatctaattgattcgcatatatatagtacatatttttttttttgggtaagtggcatgaagttgtaaatatcaaaatatgtttgttcatatctcacatagtcacattcatttagggctaaatcaagctttggattagtattattagatttgaataatgcataattatatcattgtttgcttcttgggcgtagcaattgtaatggccgggaagaaaaatcatttgtcctcctagattcaaactttgattgtatggcatgcagctatattatttgcattttgtcgttaatgatgaattctacgtcaagacttctactgttatacttttgtagccttgtagacgtatttagaacctacctggataagttttatatatatatatatatatatatatatatataaaatatttgaataagttgatttaaaaggacttttaaaagaaaaaaaaatgaaattctctattaagtcaaattaacttatgtacatatgatgctagctaaacaaagagcgtttcaacaaataaacaataacaacttatacaaacaggcttaaagcttaattaaaaactaatcaaatgattgaatataagtaagtaatgtactaaaattaaaattaaatagttaaggtaatagttgagttagatttttaatgaaaataatttttgatcaaattttagttacctcttcactcgaatgagacataatctttttctcctaataaacatgaaaacgttaaaaaagctttattaaaagctactcatattagcaattctaagactaggtaaaacacaaaaacattgcctattacaggggacttttttcaagctggacttttttcacttttattctgtggacaatcgatgggttgttccttcctacacctcaaagttgtttcttacattctttttagaatgtctgtttttaccttttaaattgatcattccagaaataaaaatctataatcaattcacaatttaattttacattctaaatggatcattttgggaggaaaaaaaggagtgctgaattttaaagatacaggaaacaacagtccaaccggtgatatggaagaagaataacattagctcaaattttaagttgttcttttcgcctccaactctttaaacccactaagcccaaattcattgtggaagattttactttttttttaacttttttttttatttttattgtattttacttttcttcttgaagcttcctaattctgcaaaacatgctatcacattttttctaaatttctcgcgcataaactaagactggtagaatgggtctacttgttctaggttgttccaccgttgattaggtagggtgagttgccttaggttagtaatgtaggtcaaaaatcctaatacgtccagacatcctatttaacgacattttggcaggttgatgaattcatttgccaaaaacaaataaattgaattggcaaatgggtggattaattaacctaaaaaataataaaaaggatgaaagattataaaaaaataaaaatatagatatacaaatattatctaaaacattttgaataactgactacataaaaaatcataaaatattagatcatcaatatttaaaaacatatcatcaccatacaaacagtaataccgtgttcacaaaaaaataaaaacccagtaatcccttgtctaaaaaatctacaaaataataaaattccgaacaatagtaaataataacatagacacctcatagtacgtttattaccttttccgtctaaaaagaaaaataaagcatgaaaaattcaataagaatactgttatatatattttataatatcttcttaatgctagttagtcaaaattgtcgtcttagagaatgacgtacgaaaaccaacgcataacctaggaataatagaagaaaataaacatgtaacaaaagaagacgaaacatagagatgatgggaagccagaatgatgtgaaactattgagctttgagttgagtccagttggtcatagagttgaatgggctctgaagctaaagggtgttgattacgagtatgtagaagaagatatcttcaacaagaccaatctccttctggaactgaacccggttcacaaaaaggttccggttcttgttcatcaccaaaaaccaatcgctgagtcactcatcatcgttgaatacatcgatcaaacatggaagcagcagtatccgctaatgcctcaacatccttatcaaagagctcttactcggttttggggtaccgtggctgataaggtaatttgtcacaccctctttctattgtaattttttaaatgttttcggttcattttttacgttgtaaatttctgaaagaaaggaaataattgcgaactcaccttcactccttcataatggattaagaataaattcaaatcaaagaaaaatttccttgtttatttatgaattatatttatttaaagaatatatatttttgtatagtttgcttttttatttccttcatatgcaccttactcctcgttgagtgcagagacagtaaaattcccttttccctcttaatacgtataagaatttcttcgcaatgaatgcaaaataacagaccaccggaaaaaaaaaaaaagaagcaaataattaaaatgttttggcctttaaaatgactctttcgaaacccacattgaccaacatagaaattgggcccaagtactcaacaacgaagaattttttcttattattaggtccatgacaatgattttactgtcaatcaaatttggccatgtgcattttatgtagatttacacaactaccattaatcgaaccaaaaaaaaaaaaagtaacttacaatgacttaaaaacaaaactagctgccattaaccaacaaaatcaggtaatggtttaatagtaattagatatttagattttatattctaccgtacgtgcaatatgaagtaagccaaaagaaagaaagaaaaccactccctctagcttttacggtggtatatatacacatacacaagctctattaatttgataactcattttcaacacctgttttatgaatatatatgtaacagcttgcgaagacatcatatgttgcaatgtgtagcagcggggatgaacaggaaaagagtgtgaaggaagccatagaagtaatggataaaatagaagaagagattaagggcaagaaattctttggagggtacaatattgggtatcttgaccttgcatttggatggatcccttattggcttcctgtttgggagaaagttgggtcaatgcaaatagttgacccattaaaacattgcgccatctctgcatggaacaccaattttctcagccaccctgtcatcaagaactgcttacccccaagagacaagatgcttgcttattcccgccgtcgcaaacacgagttttcttttactcttcgtcgttgagtcatgctttttcctcaatatctaattcaataggaaaatgtttggtagatacccaatgtattaactaatatctagagagagtaaaaaaaaaacttatatgtatgattagagcttacaatatgatacgaagaaaaatatacaaagaaaaataagaagtgttattaaaatgtgtaaaataaaagatgatttctgaataattatccaattcaatatgatttaggcagagggaaaaacctataagagtcaattcagagataaaatcgaatagaaaaaataaaatctttcttttcactaacctccagtaaaagaaattaataggcacgctagggattgactcaattgtactgtacgtttaatcttgggttgtgaatcatctgctgttaaataaattatataagccatgaaagacctacttacattttgggttcgtcattcctgcccctgcatatctctcggtattcaacatttaaatacatataaacaaatattcaacatttaaattaataatttgatgaaaaaaatgaacggaaagaaaagttgcctaagttaatgtcaatcaaagatacaaaattgagtactatgtttattagtaaaaacaattttttcaattaagaaatcatattaaagtaactatttttttcatgtgttgaagtaagatagcgtttccttccaaaaaaaaattaaggtggcgttatggactagccaatatttaaattaaatgtaattattcatttaaagaaaaaattgaatgctaatttttaatttcttaagtcaatgtcaaatacagataaaaaaaaggtaaaggtctgattattgaaaactatatgttacagtaacttcttttttttaaaaaataaaaatgcaaatatattacaataggcacaaacatcaacaaggtggtactcctactctcatctatcatttagagcacacttaaaatttactgaataaaagagaacaaaacaaacacggggagcaaaaatcaaactcattgcccaaaaagctaacatctaaaccactatagttaggcaaagctaacctattacattaaatacgttcaacattcaacattcaaaagttctaaatgtattaaatatttatagaattatacaagtcataaaatagttttcataaagcaatggatacatattacaagataaaaacggcatattaataaaagagaaccaggtcaaggtgacaagttaataatttgataattaattttcataaattacaaaaataaccaaccaacacattaaataattaacagcaaaagaagaaacacaaggagaagaatagaaggaggtgaagctctgaattctaaaacaagatgtgtagtgaagatagtgtgaagctggcgaacttttgggcgagtccatttggcaaaagggttgttaaatgggccttgaaactgaagggtttaacgaacggatacaaattatcgaatccgtaagatttttgtaagtttttttttaaagttaaaatatatattttcaaataatttaaaacaatgacacatgtaggactcaaatatatgaccttagatattccaaccaattaagttaataagtcaattatgttaaaaaataattaatgttgatatatataatactaaattttttaatgtatatttaatacacatataagtttacataataaattatgttgaaaatattaaagtaatagcatgagaaataactcaataatcaaaataaaattcaaattaaattaattatatatgactcattaattgataaaactaaaataaaagagaatcctatttaataggatcataactaacaattatcctaattaataaaatgaaactaatatccctaattaataaaataagaatctaaaataagaaaaaataaaaaaattagataaactaaacaattaaagatttagatgtgtattaaatatacctcaaaaaatttagtgttatatatatcaatattaattgttttttagtataattgatgtattaggtcagttggtttgaacatcgtgttaataacttgaagatcacgtgttcgagtcctacatgcatcattattttaaattatttgaaaaaatatatttggttatggagttgaacccgattcacaagaaggtttcagattcttgttcatgcccagaaaccaatcgctaagtcattcaccattcttgaatacattgatgaaacatggaagcagtatccattattacctcaagatccttatcaaagagcactcgcttgcttttgggccaatttcggttagcaaaaggtattttttattccaaattctctatttttttttttgaaggtttgttaaaccaatttggagattccatttgacgagataattcttgtaaaagcattttacatccatttttttacagttctaaattttcttagagagatactaagaatgaggatatatgttttattcgtttctgaatttttagaaacaatttacatatcattaacgaataatcggtggatgacatcaaaaagcactagggcaaatttgggtaatataatgttcatatttcatgcatattacaatgtgatgtttgattaaaaaataggtttattttgtaccattttttcttttttgagatttacaatgccacgtacactttcaacaaattaattatttttcagtgcctcctaatttgtatatatttttatatactagcttatgagtgcagcacgaaaagcaatggcaaccagccgggatgaacgcgaaaaggctagctcttaaggaaacgagagaactaatggagaaaatagaagaagcgattaagggaaagaaatattttggaggggacaacattgggtaccttgacattgcacttggatggatcacttactggcttcctgttgtggaggaatttggatcgatgcacataatagacccattgaaatttccagccatcacttcatggatgaccaattttctcagccaccctgtgatcaaggacaatttgcctccaagagacaagatgcttgtttactaccgcaacttggttaattaaggtttagatggatgtatttgacaaattatgaatttaataaaactactagctcttgtaaaatgtttttcataaattatgatgaatttattaaaaattgctcgtgtaatgtttttcatcaacaattaagactttgttgttaatttctttatagagtgaatttcccgttttaaagagttaattaaatattaatcttttataaagaataatatctttattagttgaataaaagttatataaactatgggagtaggtaatagggaataataaataatttgggtttgtaatatgtagtcgtcatccgattacaaaccctagcctcttcttggttgtattggcgtgtgtaatgcttattttcattaacggtatatacaagatcgagccttataatattggatacaactctatctagctagttagttatgagtgaagttcgtgagtttgatggtcaaattatcttactcgaatacaactaacgatgatggtaacagatcataataaacttatcttcatccatgcaatctagggatggaaataggtcaagttgtctatgaggggcctttgccctggcctggtctagtttgtttattataaatgtcaagtttggactttttgaaaagtctatttaaataaaaaaatcgggctcaagctttacaaaaagcctgttaggcctgccaggctaccctatatatatatatatagatagatattaaaattaaaaagatataaatcaatctttttaaaaaagagataaaataagataagataaaatctaaatagcttatcttactatttaataaaacttacgatattttactttgcttattttgtttacaatattttgttgaatactgtgttatgattataattcttaattgagtttgttgtaattagtgaattttaatctcatattagagtgctctaattaattttaatttttttcacatacaaattaaaagggaagtatgtcaatatgtgtatttctttatattaaattaaaaaaaatattatgcaaattctcgaagtttcactaatatataatatttattgtaaaataggctttttaataggttcataggccaagtcagacttttaaatagtctaagccaagcctaaaaaaataggtaaataggttaggccaggcttgatgtttttaaataagggcaagatcaaaattaggcctaaccaaacctgacctgacctatttccatccctaatacagcctttctaactagcagcaaataaaattataataagttccatctaattaatgtcagaacccatctctaatgtaacattgactattgaatatgctaaatatataaatagttttaaaactaagacaaataactaacgactgaaaacgacccttatagtgcagtccaagcatgatgattacaaaagatagtagtaaaacatttcggacaatgttattatggcagggnnnnnnnnnnnnnnnnnnnnnnnnnnnnnnnnnnatatatatatatatatatatatttttttttttttttcaaaacatgtacctaacatatgtcagtccgtatacatgtttatgtacttaattaacataaacaattaataatacataattgtttgaataattttatttatactattaattatgaagaatataagtaagaacagtttagctaggaaattagaaaaaatcacgttaattgttggatagtgagatgaaggtgccaagtgcaatccaatccaacgccaatattggtcaaatttgtctgccgtaaccaaccaacaaaagataaataactaatttgtgtatgcatattgttgacgagaaacagtgaaacacacatattaaagagacacgtaaactataccaaattaaaaagagaggcgtgtaaactataccaaattaaaaagagagacacatacaactacaaatgtattagagatatagaagaaacaaattaaaggaattgaaattatattttgaaagaagatgggaagcgaagaagtgaagctgttgagcatttgggtgagtccatttggtaaaagggttgagtgggctttgaaactgaagggaatagagtatgagtatattgaagaagatatctcaacaaaagcaatctccttctccagttgaacccggttcacaagaaggttccggttcttgttcatgcccacaaaccgattgcagagtcatttatcatccttgaatacattgatgaaacatggaagcagtatccattgttaccttacnnnnnnnnnnnnnnnnnnnnnnnnnnnnnnnnnnnnnnnnnnnnnttttttttttttttctctttcaaattcccttaatttttcttattgaggttgaaccaacttggagattccatttaacgagataaatcttttaaaagcatattgcatcctttttcgtaatttgtatttgcttagagaacgaggatgctttttttttcctttctgaatttttaaaaccataagaccatgtgtctgtctgtcattaacgaataaaaatttatgactccaaaaaacaccaaagaaattcgactgaagttcagatttcatgcatatgcaatcacaatgtgatgtttgattaaaaaatagcattattttgtacgatgttttttacacaaaaccacactttcaacaacttattattttccaattagtgcttgctctgtatatatttatatataatacaatagcttgggaaggctggatgggtagcaatgtctaccagcggagaagaacaggaaaaggctgtgaaggaagccatagaaatgatggagaaaatagagacgactgagtgaaaaatgtgcatattcgtaggtaagcaaactggattgagatctgatattccaatccaaacccatgtcagtaatctgtgtacattattgatcgagaaaactattttatgtggtcaaagtttatatacttttatatccatgaattttgtccttaaactttaaaaaaataatacgtagatttagtctattctctttaagaatttatcatgctttttaacatattttcttttaagtttaagaatcaaattcatcttgtggtgatttaatatgttctttaccttgttggtgttggttccgtttaatgctgttggcccaaatccctaggtgtgaaagggaattgtgattgggcccaaatcccaaggtgttgaccttggcccatttccatttagggtaaatccctaaatgctgtgcttctctataaatacccccattatagatggaggcaggtgacgcaacagaagattccagagctgacgctaggttgcggcagtgtgaggctgagcgaaaacagagagtgagtatttctccggcattgttggccgtcgagggtgtatctccgagagcttgtgagaggttcttgttgaggggtttcacttctgttgtaggcgaggctgggtggctccggtgagtgaccgttgagcatttgtattcattatttctgaatagtggatcgttttctggacttggtcccgtgggtttttcctcttgaaggttttctcccacgttaagctataatgtgtgttgattctctccctgctcttccctttgttttatgattctgtgtttccgctgcatannnnnnnnnnnnnnnnnnnnnnnnnnnnnnnnnnnnnnnnnnnnnnnnnnnnnnnnnnnnnnnnnnnnnnnnnnnnnnnnnnnnnnnnnnnnnnnnnnnnnnnnnnnnnnnnnnnnnnnnnnnnnnnnnnnnnnnnnnnnnnnnnnnnnnnnnnnnnnnnnnnnnnnnnnnnnnnnnnnnnnnnnnnnnnnnnnnnnnnnnnnnnnnnnnnnnnnnnnnnnnnnnnnnnnnnnnnnnnnnnnnnnnnnnnnnnnnnnnnnnnnnnnnnnnnnnnnnnnnnnnnnnnnnnnnnnnnnnnnnnnnnnnnnnnnnnnnnnnnnnnnnnnnnnnnnnnnnnnnnnnnnnnnnnnnnnnnnnnnnnnnnnnnnnnnnnnnnnnnnnnnnnnnnnnnnnnnnnnnnnnnnnnnnnnnnnnnnnnnnnnnnnnnnnnnnnnnnnnnnnnnnnnnnnnnnnnnnnnnnnnnnnnnnnnnnnnnnnnnnnnnnnnnnnnnnnnnnnnnnnnnnnnnnnnnnnnnnnnnnnnnnnnnnnnnnnnnnnnnnnnnnnnnnnnnnnnnnnnnnnnnnnnnnnnnnnnnnnnnnnnnnnnnnnnnnnnnnnnnnnnnnnnnnnnnnnnnnnnnnnnnnnnnnnnnnnnnnnnnnnnnnnnnnnnnnnnnnnnnnnnnnnnnnnnnnnnnnnnnnnnnnnnnnnnnnnnnnnnnnnnnnnnnnnnnnnnnnnnnnnnnnnnnnnnnnnnnnnnnnnnnnnnnnnnnnnnnnnnnnnnnnnnnnnnnnnnnnnnnnnnnnnnnnnnnnnnnnnnnnnnnnnnnnnnnnnnnnnnnnnnnnnnnnnnnnnnnnnnnnnnnnnnnnnnnnnnnnnnnnnnnnnnnnnnnnnnnnnnnnnnnnnnnnnnnnnnnnnnnnnnnnnnnnnnnnnnnnnnnnnnnnnnnnnnnnnnnnnnnnnnnnnnnnnnnnnnnnnnnnnnnnnnnnnnnnnnnnnnnnnnnnnnnnnnnnnnnnnnnnnnnnnnnnnnnnnnnnnnnnnnnnnnnnnnnnnnnnnnnnnnnnnnnnnnnnnnnnnnnnnnnnnnnnnnnnnnnnnnnnnnnnnnnnnnnnnnnnnnnnnnnnnnnnnnnnnnnnnnnnnnnnnnnnnnnnnnnnnnnnnnnnnnnnnnnnnnnnnnnnnnnnnnnnnnnnnnnnnnnnnnnnnnnnnnnnnnnnnnnnnnnnnnnnnnnnnnnnnnnnnnnnnnnnnnnnnnnnnnnnnnnnnnnnnnnnnnnnnnnnnnnnnnnnnnnnnnnnnnnnnnnnnnnnnnnnnnnnnnnnnnnnnnnnnnnnnnnnnnnnnnnnnnnnnnnnnnnnnnnnnnnnnnnnnnnnnnnnnnnnnnnnnnnnnnnnnnnnnnnnnnnnnnnnnnnnnnnnnnnnnnnnnnnnnnnnnnnnnnnnnnnnnnnnnnnnnnnnnnnnnnnnnnnnnnnnnnnnnnnnnnnnnnnnnnnnnnnnnnnnnnnnnnnnnnnnnnnnnnnnnnnnnnnnnnnnnnnnnnnnnnnnnnnnnnnnnnnnnnnnnnnnnnnnnnnnnnnnnnnnnnnnnnnnnnnnnnnnnnnnnnnnnnnnnnnnnnnnnnnnnnnnnnnnnnnnnnnnnnnnnnnnnnnnnnnnnnnnnnnnnnnnnnnnnnnnnnnnnnnnnnnnnnnnnnnnnnnnnnnnnnnnnnnnnnnnnnnnnnnnnnnnnnnnnnnnnnnnnnnnnnnnnnnnnnnnnnnnnnnnnnnnnnnnnnnnnnnnnnnnnnnnnnnnnnnnnnnnnnnnnnnnnnnnnnnnnnnnnnnnnnnnnnnnnnnnnnnnnnnnnnnnnnnnnnnnnnnnnnnnnnnnnnnnnnnnnnnnnnnnnnnnnnnnnnnnnnnnnnnnnnnnnnnnnnnnnnnnnnnnnnnnnnnnnnnnnnnnnnnnnnnnnnnnnnnnnnnnnnnnnnnnnnnnnnnnnnnnnnnnnnnnnnnnnnnnnnnnnnnnnnnnnnnnnnnnnnnnnnnnnnnnnnnnnnnnnnnnnnnnnnnnnnnnnnnnnnnnnnnnnnnnnnnnnnnnnnnnnnnnnnnnnnnnnnnnnnnnnnnnnnnnnnnnnnnnnnnnnnnnnnnnnnnnnnnnnnnnnnnnnnnnnnnnnnnnnnnnnnnnnnnnnnnnnnnnnnnnnnnnnnnnnnnnnnnnnnnnnnnnnnnnnnnnnnnnnnnnnnnnnnnnnnnnnnnnnnnnnnnnnnnnnnnnnnnnnnnnnnnnnnnnnnnnnnnnnnnnnnnnnnnnnnnnnnnnnnnnnnnnnnnnnnnnnnnnnnnnnnnnnnnnnnnnnnnnnnnnnnnnnnnnnnnnnnnnnnnnnnnnnnnnnnnnnnnnnnnnnnnnnnnnnnnnnnnnnnnnnnnnnnnnnnnnnnnnnnnnnnnnnnnnnnnnnnnnnnnnnnnnnnnnnnnnnnnnnnnnnnnnnnnnnnnnnnnnnnnnnnnnnnnnnnnnnnnnnnnnnnnnnnnnnnnnnnnnnnnnnnnnnnnnnnnnnnnnnnnnnnnnnnnnnnnnnnnnnnnnnnnnnnnnnnnnnnnnnnnnnnnnnnnnnnnnnnnnnnnnnnnnnnnnnnnnnnnnnnnnnnnnnnnnnnnnnnnnnnnnnnnnnnnnnnnnnnnnnnnnnnnnnnnnnnnnnnnnnnnnnnnnnnnnnnnnnnnnnnnnnnnnnnnnnnnnnnnnnnnnnnnnnnnnnnnnnnnnnnnnnnnnnnnnnnnnnnnnnnnnnnnnnnnnnnnnnnnnnnnnnnnnnnnnnnnnnnnnnnnnnnnnnnnnnnnnnnnnnnnnnnnnnnnnnnnnnnnnnnnnnnnnnnnnnnnnnnnnnnnnnnnnnnnnnnnnnnnnnnnnnnnnnnnnnnnnnnnnnnnnnnnnnnnnnnnnnnnnnnnnnnnnnnnnnnnnnnnnnnnnnnnnnnnnnnnnnnnnnnnnnnnnnnnnnnnnnnnnnnnnnnnnnnnnnnnnnnnnnnnnnnnnnnnnnnnnnnnnnnnnnnnnnnnnnnnnnnnnnnnnnnnnnnnnnnnnnnnnnnnnnnnnnnnnnnnnnnnnnnnnnnnnnnnnnnnnnnnnnnnnnnnnnnnnnnnnnnnnnnnnnnnnnnnnnnnnnnnnnnnnnnnnnnnnnnnnnnnnnnnnnnnnnnnnnnnnnnnnnnnnnnnnnnnnnnnnnnnnnnnnnnnnnnnnnnnnnnnnnnnnnnnnnnnnnnnnnnnnnnnnnnnnnnnnnnnnnnnnnnnnnnnnnnnnnnnnnnnnnnnnnnnnnnnnnnnnnnnnnnnnnnnnnnnnnnnnnnnnnnnnnnnnnnnnnnnnnnnnnnnnnnnnnnnnnnnnnnnnnnnnnnnnnnnnnnnnnnnnnnnnnnnnnnnnnnnnnnnnnnnnnnnnnnnnnnnnnnnnnnnnnnnnnnnnnnnnnnnnnnnnnnnnnnnnnnnnnnnnnnnnnnnnnnnnnnnnnnnnnnnnnnnnnnnnnnnnnnnnnnnnnnnnnnnnnnnnnnnnnnnnnnnnnnnnnnnnnnnnnnnnnnnnnnnnnnnnnnnnnnnnnnnnnnnnnnnnnnnnnnnnnnnnnnnnnnnnnnnnnnnnnnnnnnnnnnnnnnnnnnnnnnnnnnnnnnnnnnnnnnnnnnnnnnnnnnnnnnnnnnnnnnnnnnnnnnnnnnnnnnnnnnnnnnnnnnnnnnnnnnnnnnnnnnnnnnnnnnnnnnnnnnnnnnnnnnnnnnnnnnnnnnnnnnnnnnnnnnnnnnnnnnnnnnnnnnnnnnnnnnnnnnnnnnnnnnnnnnnnnnnnnnnnnnnnnnnnnnnnnnnnnnnnnnnnnnnnnnnnnnnnnnnnnnnnnnnnnnnnnnnnnnnnnnnnnnnnnnnnnnnnnnnnnnnnnnnnnnnnnnnnnnnnnnnnnnnnnnnnnnnnnnnnnnnnnnnnnnnnnnnnnnnnnnnnnnnnnnnnnnnnnnnnnnnnnnnnnnnnnnnnnnnnnnnnnnnnnnnnnnnnnnnnnnnnnnnnnnnnnnnnnnnnnnnnnnnnnnnnnnnnnnnnnnnnnnnnnnnnnnnnnnnnnnnnnnnnnnnnnnnnnnnnnnnnnnnnnnnnnnnnnnnnnnnnnnnnnnnnnnnnnnnnnnnnnnnnnnnnnnnnnnnnnnnnnnnnnnnnnnnnnnnnnnnnnnnnnnnnnnnnnnnnnnnnnnnnnnnnnnnnnnnnnnnnnnnnnnnnnnnnnnnnnnnnnnnnnnnnnnnnnnnnnnnnnnnnnnnnnnnnnnnnnnnnnnnnnnnnnnnnnnnnnnnnnnnnnnnnnnnnnnnnnnnnnnnnnnnnnnnnnnnnnnnnnnnnnnnnnnnnnnnnnnnnnnnnnnnnnnnnnnnnnnnnnnnnnnnnnnnnnnnnnnnnnnnnnnnnnnnnnnnnnnnnnnnnnnnnnnnnnnnnnnnnnnnnnnnnnnnnnnnnnnnnnnnnnnnnnnnnnnnnnnnnnnnnnnnnnnnnnnnnnnnnnnnnnnnnnnnnnnnnnnnnnnnnnnnnnnnnnnnnnnnnnnnnnnnnnnnnnnnnnnnnnnnnnnnnnnnnnnnnnnnnnnnnnnnnnnnnnnnnnnnnnnnnnnnnnnnnnnnnnnnnnnnnnnnnnnnntcttgattttaattgttaattcaagaaaaagattaaaaattacatatttattttttatataaaaatatcgtatgatgcaaatttattctttacatttctaacatagtaaagcgttgaatgtttttttaggataatgaaaaaataaacatataacattatattttattatgaaaaatcataatcaaaaccatcaatttttgtgagttttttaaaagtcacataatctctacatgtgaccccatgactttaaaactttatcacctatgaatggttataagtctcatatttatcattttnnnnnnnnnnctcttccctttgttttatgattctgtgtttccgctgcatattgtgcattctttcgtgttttttgggctgttctgggttgagacattgctccccagtgttatggtttggtagaggaagctcccagtcgaccagaggaacgtggtaccgggcacgttgtatccgggtacgtgtggtgccgagtacgtgaggtgtccgggtagaaattccacgttggttgtggtgccgagccgacttcgtggcatcggattgcaaattccacaacaccttttcataggtgatttacagagcacggttctttcgaccagggattgtgcatgtgaggttagtgtagtttagcactgcttttgttcgggttttaagaattcatattgctctaatgaagaatcaacataactcacagagttggcttggctccacaccctccatttgcacccttcaaaatatttccagtacttcacaagggtttgagctctgagataagcctgaaatcattgcattccaagaagtaatatctctgagataagtctaagtgacccatctcacagtacatgtcaacaagtcctcgttaccatgttttgtgtgctaaataattgaaaaagttacgcatagagagaggtgaaaacaaataccacaaaaggtacctaaaacccccgcatcccatcagactgtctgactgttacataagcctagaataaatccaagtaacttctgtggatatcaaaacataattagaaggatatacttgtgatcatcgacagatattaattagcagttaagttagtagaaaaaagacaagaaacagtacatcgatgcaacaatggttctaattaagtgaaattaacgtgctaacttgaaaatcaaaaggccttaacttcctttcctataatgtgaagtgaatcatctgcacaagagtatgaaaatgacacgttgttggatattcattttgagtcagaggtggaagtgaattttgaaacgaagtccatttggtcaaacttgtccccacatgagaaaaccaaatgaattacaccgataatttgcataaattacgagaataacccagcagacacactattaaaagagaggcacaaagaaggaagtggtgaaacacggaaggaagatgggaagcgaagaagtgaagctgttgagcttttttgcgagtccatttggcaaaagggtagaatgggccttgaaactgaagggtgtggagtatgagtacatagaacaagacatcttcaacaagagtagtctccttctcgagttgaacccggttcacaagaaggttccggttcttcttcatgcccacaaacccatcgctgagtcattcgtcatcgttgaatacgttgatgaaacatggaagcagtatccactgttgcctcaagatccttatcaaagagcacttgctcgattttgggctaatttcgctgagcaaaaggtcatttctaaacccccttttagcttttgttttccgccagtgggtttggcagatggcattttttttcttcataaatattaaagtgagaaactataatttttatttttaatatgtaattaataaataaataaataaaattcataaaaaacttactatgattctttgaaaattaattttaattcattttttcgtaaaacatttttaaggagaaaaaaagaatctaattttatcgagtaaaaaaaaagttttagttatatattttacataaatctttaattctcatgattcatattaaaattaactaaacatatttaagatattgtcaagaattatgattcttaaaatttatatttcctgagtataaaaagtttcttaactaccaaacacctcataaaaacaaacctatagattccaattgaggacccaaatacattcagcttattgcatagtttattttatagaccattttatgaatcaaatttagactacaaagactagataatgtagcaaattctcgaagtctggtttggttttttaatacaattgaaatattgtgacagcatagagtttttgtctttaacaaattatcatattattaaactaattaacttttataaacctaatttaaaagtcatgcatacaatattatctaagggcgtacttagtatgaactttttatacttttgatattttatttcatttgctttttggaatgaaaatgaacatgttattgtttttctatgttactctgtcatttattatctatatatcaagtgagttattcacatcttgttcgaaaatttgaacttaaaacaatataaatcaaagtgaagtgtggtaggccgaaaactcacgggtttcagaatggctcagacagctttagagaagcttcctttgcttcaatgaaagcattgatttgtaagccgtgattttaattcataatatagtagcacaaaattattttttgacttcttttgggatatatatatatatatatatatatatatacacacgttaaactctattcaattaacttgtttttcaatgacatccatgtatgtaagtaataacttatttttcaatgcttgccttgtgtgtgtataacagcttttagatgaagcatggattagtatgtatagcagcggggatgaccagcaaaaagctgtgaaagtagccagagaagcaatagagaagatagaagaagagattaaggggaagaaatattttggaggggagaatataggataccttgacattgcacttggatggatctcttactggcttcctatttgggaggaacttggatcgatacagataattgacccattgaaatttccagccaccactgcatggatgaccaattttcttagccatcctgtgatcaaggacaacttgcccccaagagacaagatgcttgtttactaccaaagtcgcagagatgggctttcttcaacttttcagggctgattcaaggtttaatttagatctattcctattcctctatatgtttcttatggtccatgttataggccatgatattggattgccttagtatcataagaatatgagggaatcatactagctaagtttgtgtgttggggttttttgtgctattattttctgcggatgccaatagcaagattgtggattagtttgatgtcttaagttaaaacttgtggaataattttgtgaattttatttagactttttcttgttatgtagagaagtttctttggttaaattttcaatattaaattatgtctttcttgttatcttttcgttgacgttatttcaataaatttaataaattataaatgagttgatgaaataattagccaccattcactaggatgtaaagcatgggaaatggaataactaaaatcaattgatttgcgttcttgattttaattgttaattcaagaaaaagattaaaaattacatatttattttttatataaaaatatcgtatgatgcaaatttattctttacatttctaacatagtaaagcgttgaatgtttttttaggataatgaaaaaataaacatataacattatattttattatgaaaaatcataatcaaaaccatcaatttttgtgagttttttaaaagtcacataatctctacatgtgaccccatgactttaaaactttatcacctatgaatggttataagtctcatatttatcatttttaatcattataagtctcaaatgtatcattcatataacttcttataagctcacattttttgtgtgagaattcttacttttgtgtaaatataagacttataatgatcattttaatataattctatctcattctttttttttaagactctttatgattgattaaaatttattaaaatcattatatttaataggttttacttcttatataatgatcatttttcttaatttatattaaacgaaaaacaaaatatactaaaattgatgatttatgataaattttgatcaattataaaatgaatctttaaaaaagtgttaagaaaaataccactaacattcctcaatgcattctattgtaaattataatcctcatgcaaacttgtaaaatcgattccaactcatcatccttgggttagtaatttttttttgtcatatccatgtggttcgtatggctaagctgctacgtatatgattcttacaagcttcaatgcttcatagttaagtggttcaatcctaaagcttatttatatataagaattcacttgagcttgtgggaaagctcatgggaaagctcaattagcacgcatgtggagtttgtgataatacatattggattctcataaaatacactcttaaaaagaaataaaaaatattaagtataattaaatcccaaactaaaggattacaattgttattataattacccatataaaaagttcacaaatttaaatttattgactgataaattatacataaccttataatcaatagtcaacaatatttttgtcttttattataatattttatttcatctctattatgcattaattattttttttactaaaatatccttatttatttcaatttataattaaacgctactttaaaatgtcaattttccttattgaagaagataagtaaactctcattaatgttaatgacaaattttaaaatattacaattaaagaaggatttaatatcaatacctatattaactaattttcttaattatgtgttataaataagatgagagagagtatccttttaagtaacatctagtagttgaaacaatcagttttctttcgtccaatttgtcattttatttaaatttttcacaaattaaatcattaaattattttaaacctctttctcttaaaagctactaaccaaaatacaaaattttattttttataataaaacattttttttaaaaaaagtcgaaattttcattcttcaaaccccaatcttatcttttacaatttttgtcttcaaattttatcaaaatttcattaaatttctaacaaataaatttctaaaactcttatcacaaatttattataaactccccccaaatatttgaataaaaagtgaaaatataatgattttcgattaagatcactatttactgcaaccaattacggcctacctaagaatttctcatcgaaggtcaaaagatattatgtccaattaacataatttacaattataatttataaatagaaatagcaatcaagttacggtagtcacctctgccaaaagaagaaatggtataattttacagtgtaatcatacctaagctagggatcattcgtattataaccaaaatcagctaccttacactacaaactatacaataatatgcaatggagacgtgaatatataaaacatcatcacataacatttgcattttaacctactcttaaattaccacgagacggttatattcatcagaagctaaaacctgtttacacttgaaccttaaaaacaaaacttacttaccccactcatgaacagggagaggagttagccttgtctcgttactctcaaaactaatatcatccaaaccacgacgctctgtaaaatttagcggtgactgatcacacaggtctaaattccaaaacaacttgagataattcaggcaggcaacttcagtttcgaattgttcttccagctgaaaaacaaagctccttaaattacctatttgttatatgagtatagtaaaaacaagatggaccttaacagacaataaaattacctgacgaagtaatagtaaaagaaatctgcatacaaagctgtctgaacaacacctgagacacaagctgtaatagtaaaacaatatagaagttagaatattgctaaggttgacataatgtcaaagtaggttttattttcaccctttattacctatccatctagtaaaatgtggctcagtcagatagcggtatatccagttcaggatgtaaaatgcacgatatgcactgcattttaaaaataatcagcacatctttgatcataataatcagtacattctataagagtttactcttatacattctgagacaagttcaaattgaaatgtatgtacaacttactaaatcctcaagtaattgtgcaaacatcaagacaggagacaaattaggaaatacataagcagaagagtccaattcaacccaataaacatcaagatttccaaatcaggtaccacaaaaaagttcgggcaaacatatacctatggagctaatttataatacatcactttcgaggagtttaatttcttagctatttcaagatagaaaatattagtataccattgtcactagaagatatctcaataacttagaaaggactatctgctaatgatcagcataaaggagtgtaagcaagtaagcaaccaaaacataaaggcagatctttaaaagagaactcaacagaagtgtgcatacccaagaaagaatacatattgcccagtcaaattgtccacatttccacttctttgcaacaaaaccaactggggtaatattgcaactgcctccaagtatattgaaaatgcccagaaaacctgtaacagattgacataacatcaactatttatgatgttacaatgtgtaacagaattatcataaaggtaacatgtaatgcaaaaaacaattttcagattggcaatcaataaggaatcaaggataagcaatgtatgtttggacaggaagaacacatgaaaccatgtgatgtatttgctttaacttttgcaatattaacctgaaaaataatgggaaaggccagttacacattttgcagattccataaggaaatagatattcccagaagttttataacacaataagcagcagcctatcgtaccattttatgacttttagcctttcccagttaactatgtatcagagccataagacatgtatgcattgcatttttcaaactatcaagtattaacgacgtatctttttctccaagagttggcatcaatattgtaccaaacttggtcatcctttcaagcatgataccacatgggtccctaacataatgttttttatatttccacctaaaatctgaagagcattcagaaaccaattacattttttggccaatcaggaagagaagcagcgccaaacaatagatttagcactaggcggatttctagataacataacaactagttgttaataaacttacaaaatcatcaggccataatataatttacttcagcttcttatcttggttaaaaaaattggaagtattcattccaataatgtatgacaaattgacaattgacagagtactgaactattggtaaattttcaactactgaaatttatcttagaaagcagcataaatgatccagtttccaggattaaaatacaacaggctcccaaaatttgagacttaaaaaatagagttatgaggtgatttatcatttatagaggctctatatgacatgagtcaaatggtaagacataacataaaaatagagttatgtaagggaagaactacattccttagctgttagcacttagcatcactctgaaacaaaaggcaacatgagtcacatgacacagatcccctcaaagaatcaattgatatactcactaagaaaaacatgttattatcaataacacaattagaagaatatgttcacacagctagcattggttcattagcttaagagctatgccacatcatatggaccatataaatcttactcaaaagtaattgttcaatgaaactcatatatactaaactgtaacccaccaatcaatctcacggagattccaaatgaagaaacacttgagaactttgatcttaaagttttatttttcctcctgttttgtgtaagaacagcatttgaacacataaacatggttttcacgccagaaaacttaaatggatacactactgttcagagaattttggcaataccatcagattcaataatttgacaaaattaaacactcttcaatgaaatattgaaaccttgagttgaatacaatctattgaagctttcttttaaagaagtaaaaattcgaagaaatgcacaatgattaaccatcagaaatcagaaactcaatacaaatgaaaaacaataaaaccccacagctcaaatacagaagaagacaacatgcaaatgcataaccaaaaaatcaatctatgccagtacaacactacttacataacacattcacaatgcaaaactctaaaaaaaaaaaaaagaagaagatatcattcaacacatgaatcattagaaactaaaaccaagctaactagaaagcagagaataataagtgcaaaaaggggagtgagttgaaaaagcaagggacctcttgaacagtgaacttttcatgcaagatgagtgccatagcaaagcttgccccaacaaggaaataatggcgaaaagtgtcgagttccctatcgtaacttctcctgaccatggggtgaaaacgcatacaccaaacaatggctaaggagctggcaatgaacaccaccttcatgaaggtgttgtaaacggagatgaagtccgtgaacagatccaaatagcgtgccacgaacacaatcgcgtagagctcttgagtcttgcgagaaatccctgaaaataaacagttccaatcaatcgatgaaatgatggaaaataaacatagggaattttgtttggcggaggaatgtgagtgacggaatgacactcgagaatgaaaatttggaaaatagagtaaaaaaatagccccaattttgggggaaccacgagaaaagagagagagagagagagaatggagtgaagagacctgagcatgatttggtggcgtagattttgaggaggaggacgagaatgctgagaagatgtgtcatatcaccggcgagcctgaagatgttcatggtttttgccctagcgagacacacagagagaaaacgttacaaagggaacggagaaagaaacgaaatggaaaggaatcgaaaatggagtgtgtggattttattttttttgtttctcttatttatttttttggtcgttttggtaaaagcagaacagtataagcgtgtgttcgtgtgccttccgtgaaaaggaagaagctgacggctgaggtgccactcgccctcgtctcaccgcttccttctttttttcttcttaaaattaatgaaactttaatgatttaatctcgcaataaaattaaaaataaatattaactcaattcattgtattttacaaatcatagtttaacaatttctttaatgtttaaatatgtcgtaactaagattggatagtttagatgttatttaaatttgaacatttgaaaataatttttttgttaaactttccttatttattgatcgtattctaattaaaattcattttcatttataaatcagaagattaagaaaaaaaaaaccatagtttaataatcaaaatttcaatagataaattacactttatctaaaaaataattattaaatattttttcatgagtcaactacagagtcattcagatatttcatggcaatttccctctttcctttattgcttttgccccttttctttgtttctttcactctcggcacttcaaccttcatttcgacaccaaatcaagaaggggagaaacaagcacttctattctggaactgatgctgccagaaaaacataagattccttcgatctgtgcacaaaaggtaatcatagtcaaatgatgcattgataatgtcctgctagttgaaactcaggaagaaaaaaaataatcatagtcaaatgatacattgatactgtcatgctagttgaaacttaggaagaaaaagagaagacaaaaaaaatgtgtagatatgattagatgatatgatgtaataagaaaagagataacagagaattaataagtgttgatagaaaatcttaaaacttcaatttactgttccgttttcctaatggattagtttctgataccgtgtttgttttcagtttcacaagaagactaaggaatatcatagagaaaaaaatgagcgctattgtttccattaccagaaagaaagtttgaggaatacccaattacccgacaactatgtctcatgtttcgcagcaattgcagaatggacgagtgccacaaaaggcgagatggggcaaaggacgaatgtgaagagcctcaggagttactacttggtgcaaaaagtgttagtctgcctatccacataaagcaagcacgctctttgaatggttgtgaggtctctgaatccatgagctcaattttgaatcaaattatgatggctctggcgcaaccacatatcatcattctaggggtgtatggatcaagtaatgcgagaaagcgaacgtggtggagaaaatcaccaggagaattcggagggacaatctgtttgatgtggttgtgatggcaagtttgatgaaaaagccagacttcagaagaattcaagatgagcttgagaacatgctgggtctgcaactccatgagaagactctggagggaagagctacgcgtttgcgtgaaaggataaagatggaggagaagatccttatcatccttgatgatctttgggtggaatcaacttgggtaggataggaattccgtttggaaatgatcacaaaggttgtaagattttgttagtagctgagagtcaagaagggttgtccaaccaaatgaatactcagatagaaatatccgtgtgagtcttcagaaatagaatggaaactagatttgaaaggtcagagttatcaataaaaattttcaatggcaaggattaccatcccctttcttttaaattcccaagttgaaaatctttctataatggtttatgcatcttatcttgaacacactcccttcttaattctgccttttcacatctttgactcaatctaatgtgttattatgatataaataaaatttgatggtgaacataacttattaaatataaaaaatgaacatagaggagataccgagaaattgtgcacggcaccccttataggattaaacacacttcgtacgctgggtggcacacgcatctcctattttgcaatttattttccttagaaatgaagctacataacatttcgtgcatcctgataagtcttctcacgcggcggtggcatacatagcaaatgaagtttgtggcataaattaatcagtattattctctcaaatgtgaaatggtatatgccaccgcctgcagcttgtatataactcgtatttcctttaggccattggggtatatcagcttctgctattggtttcagacctttaattcttcaagcccttctataaacacaacttaatttgattcaatatagcctccccttaacttttaggacagttagtccttcacagcacacccaattaaggaagtagatattattattcaatgggggctgctcttgcaactgctaagaaattaaagaaacaaccttgtcatctcagtgacatgcacaactttgagtcccaagtagaggaactaagaaagagcaaaatgtcaattgcacctcttgcttgtttcttacagccacatcaagcaataatttccaattgttccaaggtctctggattgataaacacagctctggaagagaccatggaagctctagcaaatccaaatattaacatggttggggtgtatggatcaagcactttgcatacgaacaatttaattgaaaaaatttcaagaagagtaaagagagataacttgtttgatgtaactgtaatggcaagtgtcacaaaaaagccagacctgaagaggattcaaggagagctcgggaacaagttaggtttgcaatttggtgaggagactgtggttggaagagttaaacttctgtgtggaaggataaagaaagagcagagaatccttgtcatcctagatgatctttgtgctggaattgacttggataaagtaggaatcccatttggaattgacaataagggatgcaaaatactcttgttatcagggtctccagaggtattgttcaaccaaatgaacactgcgatgaattatttctcgtgagtctttcttctaagaataacacaactttttgcagagagatcagaagacaagagatattagtaaagtaatttaaacaactcagagaaaacaatatctcttttaattgaaagcagttttttttatctattcaagggtatctgaagctcagaaaccatagtgttgtgaagatgaattgtgaagactgaagaaactgtataagccataatagaatattataattaaagaacatggcttctatctggtttgtttatctcacagacagcaacaataaattgacttatgttttattgttccacagggagaagtgaggcatttattagttttcacattttggataattaattgaaacaaatgataaaaaacaaggctttaatagtttatacagcttgcttaattgtgattgatttgatttcaaatctgcttacttgagtgataatagagtgtgtttcctttttctacactagtgtgcatcttttatcagctcacaaccaattgagatctcacttctctatcaactttatctgccttgatataccaccttaatcttcctaactgattgataaaagatatccccacaaaatacaaccgtaagttattttacaactaaaccttgtacctaattaccacccacttgacatctatataagcaccctctccataccaccttctacgcgccaaaacattctttgcaataacgacttccaattcatttgcaatttagcaacaaagcaagccttcaataaccaacaagaagatgaatcagtctcttgttctcactccttctacttgccccatttttctctttcactactttagctcagtcaccagctgcagctcctaaagcccctgcaaaacctgcccccgccacaccggctccagcacccacgaaaccattggtcccggcattacctcagtcaccctcttcagttgttgattcttctagaagccaagaaattgtaaagatcctaaggaaggccaagtcattcaacacactatccggttgctgaaaacaacccaaatcatcaaccaagttaacgcgcagcttgtgacctcgaaaaacggaggcttaaccattcttgcgccagatgatggtgccttttcagaactgaaaacagggtactgttgcgttcacaaagagcgattgcgtaactcacggcaagtatactgatcgttcaagtaataaatttagtaagtagagtatcgtcttcacgaggattgaggcactaaaataattgtaactcttatcttaaaattagaaagaataaaaataaaaggaattgaatttggtaataatgttgtgatttgaatttagataataagacagaatttaaataaaagaaaattataagaattaattatgagaatttatacagtaataaagaataattgtgatgaaaacctaatcacctttgatccctccttatgtaaattgaattgatacttaattacaattgttataattactcaaagatataccttcgtatattggttaaacccagatttcgcggtctttttaaccctttaattctattcaagtgtcctaatgtcttagtaacccctttcagattaagcattaagctattaaactggaatataaaaactttgcaatccttcaatcctatgtctaggtaatgtcaaactgtctctttattgctttcagaaactaaaacctcaatatgtctattgcgaattaaaatcctaagttcttctaacagattgatcagatctattaatggaaattataaattcaagaacaagataaagggaagaaatcataacaatattcattaatcatcaatccaagaaacataagagttcacattggcttttggccttcaccacaatcaaggagtaattagctagacataattatgtctagctcaatacaaagatgagaaattagatgagacagaatacaagatagaaaagtaatcaaacccctcaatcttgacttcttccaattttcaatgctttattgatttcctttaatgtctccgtgtgtgtatctgtgtatttcttcctctgaaagtattttgtggcttccttatttatagttaggtttgttaaccctaaaagctcattgatcttatcttatctttaatctttaatttgaaattcccgtaacgtgcgcccgactggcactaatttcttcctttattgttcctaaaatgcataaaaataacaataattaataatattcaaaaaatactgaacttttggcctaattctattatttatttaacattttctacttaatttttactaaaattatcctaaatttcactatatattagcaatccatcaggtacttcaactcccagggagataagcaacaaaaagcattgatacagtatcatgttcttcctgtttatgtgtccagctccaagtttgatgctctgagcaaccctgtgttcacattggccagtgacagccccacagggtatcagttaaacgtgacagcatatggtaacagtgaaacatttcaactggggtggtgaatgccacattcacaggcattgtgtacactgataaaacacttgccatatatcatgtggacaaggtgctcattcctttggatttctctaagccaaagcctatagctccagtaccagctgtggccaaggctcctaaagctgataaggacaactcttcagcagaagatgatgaccaggctcaggcaaccaaggacagctctgtatccgtcggtttgactagtactcatgagacaaccttggtgtcctttggagttgccaactctttcttttaaatccaaagaaatgtaagagtgaagattaattattgattgatacaaaaataataataggaaaagatcgatgagaagatgtgaactcattataaggggattttttttttttttctctctaaacgccgaccctttgtttgattgatgttgtctttctcttttatcatcatcatcacctaataaaagtaaagttttcgatgataaattcagttattaaaaatattattttatcctttttcctaagtagggtaaaaaggaatcaaattgatcagtgtgtccaaaccaaaacagctaaacaataacaatattatttaacagtcttttagtctttattactattttatcgataatgtgacaaccatctattaaaatacaaacttgtatttcttaaatgataaagattaaaataaagattttttttttcatataaaaacaacgtactatcnnnnnnnnnnnnnnnnnnnnnnnnnnnnnnnnnnnnnnnnnnnnnnnnnnnnnnnnnnnnnnnnnnnnnnnnnnnnnnnnnnnnnnnnnnnnnnnnnnnnnnnnnnnnnnnnnnnnnnnnnnnnnnnnnnnnnnnnnnnnnnnnnnnnnnnnnnnnnnnnnnnnnnnnnnnnnnnnnnnnnnnnnnnnnnnnnnnnnnnnnnnnnnnnnnnnnnnnnnnnnnnnnnnnnnnnnnnnnnnnnnnnnnnnnnnnnnnnnnnnnnnnnnnnnnnnnnnnnnnnnnnnnnnnnnnnnnnnnnnnnnnnnnnnnnnnnnnnnnnnnnnnnnnnnnnnnnnnnnnnnnnnnnnnnnnnnnnnnnnnnnnnnnnnnnnnnnnnnnnnnnnnnnnnnnnnnnnnnnnnnnnnnnnnnnnnnnnnnnnnnnnnnnnnnnnnnnnnnnnnnnnnnnnnnnnnnnnnnnnnnnnnnnnnnnnnnnnnnnnnnnnnnnnnnnnnnnnnnnnnnnnncaaaagtcataaaaactaaaaaaataacattaaggattaaaattataaaataattaagattgcataaggatttttttttagacagtacaaggactaaattagaaaaaaaattacaataactaaaagcataaaacggatgtattaatttataactacatttcaactttgtttaataaaggtagtttgacaaaaagagctttgttttagtttatttactcatttaattcttataattataaaaaaatttcttttattgtccttatgcttaaaaacatcatctttaattccttctaatcctctcagtaaaagtaaaaatatataggccggccagttatttgaaaggagtctactatctaacctacctgagacatatgattgaacagaactttttaaaaaataaattagataaagacttttattaagaaaacagattcgcatacatatataagctagaatcgtacacttcacgtccatctgcataagtggttagttacgtgtatatttaatacattttaatcaaccatagaatatgtttaaaagaacatattagggcgttcctaccttttctcttccacttttaatccttgcctggcagtttcacgagtcaacaacacagtaatattttaacacttcctagcaatgttgcatagccagaggagcatttcccagaaacttggttcttttctttatttttgcttctataagctaggctttttctttgcatcttccactctcgtacttattaatccttcttttccactccactccgctccaaaccgaatagggagagaagcaagcacttcatatctataaaatcccggaactgatgaaatagcagcaagaaaaacataaggcatgtttgagtaaacattcatagaagaaactcactattttcttgtacgttaataatgcatgagactgaacgcgaacaagcaaccatcacaagcatagcagtccgtcgccgtcggggcaaagtgtaagaaacttttctttactgttctatttcactattagaaactaaatgggagctatatattgagagaaattaagtttcagaaacacccaattgcctgacagctatgactcatatttttcaggaaagtgaggatggatgatagtaatgaggtacaaatagcaataagggccaaattaggacgaataccctccaactgcgcgccctgcaattattttccaacttcggaggatccctatgaggaatcacttaacgcaggcgattgcaattctcctcgttgtgagtactcatttagtgcaggcaaatgcaatcagatttttccgtccgctaaatgcaccttaattgttgatgaaataataactgctctgaggcaaccaaatattaccatagttggactgtatggatcaagttatgcgagaaagcaccaagtggtgaagataatgaccaggagagttgagagggacgggctgtttgatgaggttgtgatggcaagcatgacgaaaaagccagacattaaaagaattcaaggagaatttgagaacaaactaggtctgtgcctccaagaaaaaactctcaagggaagagctacccgtttatgtgaaagtataaagacgaaggagaagatccttattgtcttggatgacctttggggcggaatcaactttggtgagataggaataccgtttggaaatgatcacaaaggttgtaaaattctgttagtagctgagaatcaacaagtgttgtccgacaaaatgaaaacccagaaagaatattctctggacgtgcccgtcaacgttggcctaataacgaggagtttaagttgaaactttctggatttattttatttagactttctcaccgaatttctctcataaggaaaaaaaaaatggacactttggaatgtcattagacacctgatgatagaaaaaaataaaaatattataagatttataatatgataaaaaaataaaaaaaaatattgataaagtgtttaatattgtagaatcctcatgtattactattattgtaaaaaagtttgtttttattaggattcagcgcagagtgcagttttctgcctgatatgtatttccgttgtgtgattaagtattgttagcttattttattaaatttatttcaacaaatttaataaattttaaatgtttttgcattaaatttttattaaataagttgttcatgtaggagaataccaaaaagagagggtggagcgttttagttcgaagccaaacatgtaatcatgaattttggtgagtcatgtaactcatttcctatttatacatgatgtctttgacaatatctttaacgtgttgaaatcttattagatacttttcgccacaccattgtggagcactggagcctatataagtctacgtagtatgtggtgcaagattgtgtgcgtctcacatgtcagtcaaaccctgtcaccacgtctttagggtattatttcgtattgtacctccaatcgcttcatcttctcggtcatggagtgagttaagcgtcattctgatgacccggtgtcattgaggcgagtcggttgttcgagaattcgttttgaatgatatcttgtggcatagatatacataaaaacaagtcatccctcctactagagtcagcatttctgggatattcatcctggatgatgatgtacataagtatttaatgaaaatatttaatcatatttgaacacaacaaaaatcatatttaatgaagatatttactcatcaataactttggaaaaaagaaaaagaaaactaaaacatcaataattttggttcaaaaagagcagaagagttatgtaaaaattagccaccacccgtgaggtatctaaaacatgggaaagggaatatctagtattccgaccaatgaacttgcccttcggtttcggttttcaaaatctggaatattcaattgcagaagcttaaatgcaggtaatgtagtattaattttaaatccttgcctggcagtgacagcttcacgagttaacaactgaggcatctagatacttcctagcaatgctgtttaattagccaatgggtcatttcctggcaacttcttcactcttttgtttattggttttattgttttaagccttttttttatttgttcctctctagtgtcatcatatgtaaagcttcactcttttgtttattggttttattgttttaagccttttttatttgttactctctagtgccataatatgtaaagctgtccatttggatatttaatgtaatgtaagaattgattttgaaatcattacttaaactaaaataatcttgtatcaattgatataggtgttcaataatttcatttttaattattcttcttagtatgattgactcgatcaatgtgttattatgatatagttaagttttatagcaatcataatatgttaaatataaaaagagaaatgttactaaaacattttttgacatactcttttgaacatattatcttttattgattgaaatttcttaaaaattacataagttagtgggtcttatatcatatttaataactctcttttatgattttgtaattttcaataaatttcaactaatgataaatgtatgtttaaaggaatgtgttaaaaagtatcttcctagccctcgtcttatataagaatgaacacaggagagaaaatgtgcccggtactcccatcatatacacacttcatatgtacagtggcgtgtgctctccaatttatatttgcatatattagagtgtgttagaatgttctatttcgccaacatttttctttttttaagtgcttcctaagcaatgaagccacctaacatttggcacttcctggcaagtcctcttacgcggatgtaacatacatagctcatgaagtttgtgaaaataattacccattatttttctctcaacctgcagcttcagcttgtataaaaatcattgggttatatctattggtttcagactttaattcttcaagcccttcgatctataaactaaacttaatttgtttcaatataacctccacttaacttatatgatagttggtgccggaggtaagggatttgatagaaaaagatttagtgttggatgtttgaagtcctataccaagagctatcaaatgtgagcataaagagaatcttagtaatataacaagttattggactccggtctatatagacccatataatcatgcatttaacttattagacttgtatgtgaatatattatttaaatatatattaaatatattcaaaagttggttcttcacagcataccaaattagggaagcagatattaatattcaatgggggctgctcttgcaattgctaaaacttttaagaagcaaacatgtcctctcagtgacaagcacaacttggaatcccaattagaggaaccactcagcaatagcaaaatttggattgttttgtacctcttgcatgtttcttacctctaaagcaagcaataatttccaattgttatgatgtctccggattgataaactgggctctggaagacactatggaagctcttacaaatccaaaataacatggttggggtcatgggtttatggatcaaccagttcgtgcacaaacaatcgaattgaggtctagagtaatgagagataacttgcttgatcttactgtgatggcaattgttacagaaaagccagacctgaagcagatacagggagtgctagcttgggaacaagttaggtttaaatttggtgaggagattgtgaatggaagagctaaacttctgtgtgaaaggataaagaaacagaagacgatccttttcttcctagatgatctttcttctggaatttgatttggacagagtaggaatcccatttggaattgatcataagggtttcaaaatagttttgttctcggggtgtccaggggtattgttcaaccaaattaacactgcaatgaattatttcacgtgagtctttcttctaagcataactcaacttgtttgtatagagatcacaagacgagaaattagtaaaccaatttaagataacaaatagaaaacaatctctcttttaacatctctagatctttccctatgaatagcagcattttttgcttatgttctatttagttgaaacttgaaagcaaaataatctttttttcgcttgtatttatttcataagtacttgaagcttagaaaccacagtgttgtgttgatgaattgttaagaaggaagagagtatataaaccataatagaatattatgattaaggaacctggctttgatatggtttacttatctccctgactgctacaataaattgacttctgttatgattaattattcgacagagggaagtgaggcttttattagtttttccaacctggcttttttatgattgattaaacaaatgataaaaaaaaaaaataagggtttaacagttactacagcttgcttaactgtgattgatttgatttcacatctgcttacccgaatgataatagagggcgcttcctttttctgcactactgtgcatctttcatcagctcagcacaagcacaaccaattgagatctcttttctcattcaattttccctgcatttcaagcaaaaggacaaacaacacagcagccaaatccacttctcaatcaactttatctgcatcgatataccaccttaatattcctaacagatggagaaatggtatccccacaaaatacaaccatatgttattttacaactaaacctttgtacctaatcaccattcacttggcgactatataagcaccctcctccattccagcttccacacatcaaaacattctttgcaatagcaacttccaattcattttcaatttagcggcagccttcaattaccaacaagaatatgaagcaaactctcttcttctcactccttctactctccactattttctcaatcaccactttagctcagtcaccagctgcagcccctaaagccccagcaaaacctgcccctgccactctggctccagcgccggcaaaacctttagtgccttcattaccccagtctccatcttcaggagttgactcttctggaagccaagacattgtgaagatcctaaggaaggccaagtcattcaacactctaatccggttgctgaaaacaacccaaatcatcaaccaagtgaatgcacagcttgtgacctcgaaaaacggaggcttaaccatccttgcaccagatgatggagcattttcagaactgaaagcagggtacttcaactccctgggagaccggcaacaaaaggcactgattcagtatcatgttcttcccgtttatgtgtccagctccaactttgatgctctgagcaaccctgtgctcacattggccagtgacagcccgacagggtatcagttaaacgtgacagcatatggtaacagtgtaaacatttcaactggggtggtgaatgccacgctcacaggcattgtgtacactgataagacacttgccatatatcatgtggacaaggtgctcattcctttggacttctctaagcctaagcctatagctccagcaccagctgtggctaaagctcctaaagctgataaggacaacgcttcagcagaagatgatgaccaggctcaggcagccaaggacagttctggtgccatgagtttggttagtactcatgggacaaccttggtgtcctttggagttgcacttcttgcagcagcagctacaatgtcgtgttgaagaacatccatttctccagagtttctaatatgttttgaggacaagcacgcaactgttgtggagttctgtttttgttgttttcttcttgacctgtgtattgagtagcaaaagtggtgtttgtgagttatgtgaacctttgttctgttcttgttttgtcatcaagcgaaaaaatatgtgattgttttattgtcaaagataaaaggaatatctgcttgtttttgcttagttttgtgctgttcagttatatgcaccgctcggaatcatcttccactccctcgtctatgagttgcatagatcaatattcttacactaggaaatatgtataactatctaataataatcataaagatgtataagtacattttacaagacaaaatccgttgacactaaacgtaaaagctttaaaaacttgtgtctttactaagttttaataaatgtgatatataagaaccatcaaagaattatgccacaaaaactagtcgctagagtctgagagagtttaagtacttgtgaattttatgttagaattccacactttaaatacgagactaatatttttcagtacagcagaatatagtttactcaaaaaaattattaaatgtgtaaatttgctaagtcttaaacgtggttaataaattatcacttacaatttagataaagttcatgagattatttatgttttgacaataataaaaattattttttaaaataaactaaaataaggtataaccgcaaacttaaagaaattaatacttaaaataattatcatgataactcaccaaagaaaaaccattagcaaacatttcaaaatgtttttatcatttaatactattggatctttaaaaaaatttaaaatgttagttacgcatcacttttcttttacatttattaaagatgtctccattatctttatttatctattatgtgatttgtcattttaaggcttttcacttgatggctcagaaaaagttgacaataaaccttttcttatagtaagttggcaataaactaaacttcctgaatcgctttagttgtctataatgttggacgcgtagcattcatttttttatataaaaataaactatgttaaataatcaatacaagtaatgtagcattaaatagtattaggaaaattgcttctcccaattaaaagcaccattgctatatatgtgaagaaggatagacccaaatttgttaagggaaaaaaattatctttataagtaattgaaggtgcacttatacagttatacacatcctcaaaaactttaattcattataagtctttagatcttaggtgcacttattcagttatacacatactcaaaaatatgtgataataaacttactatcctcggaaattattaataaaatttgttttatgaataatatattctccaaactaaccatttatattgttttgggatgatataatcaaatggagagatataggtagtatgacataattcaggtatatgattaggccctccatccttacctaaatctctctcagacaacgccacttaagatttctaccatattgggtttttgttccccctagcggctagctacttgatggaacttctaaacctattatacagactcatcgtcccctttccacctatattttatctcatgcatccaactgattgcaacaatgatgtgaaagcaaaattaatagttcccttgcatgtacactttaacataccatgggttcaaaaatatcccctccccctcaccagttataaatcacactatatatgatgcaccacctttccgtgacaagcaaaggagatttgttctttacaactaggtatacctttccaactaaaccattgcaccttccaatcattgatatcacattcaattcccttccaccctccaaaatatataaaaggcaactccttctcccacttctctcacactccagcactccaaaataagcagtatagtagtcttaaaaaaaaacatcccacacactatcattcaccctagccaaaaccctagaaatgaggatcatgcaagagtctcaatctttcattattcccaccacaattctactactagcactatgctacaccacttcagcccaactttcaccaattcaaccccccacaacatcaccatcacccccatcaccaccactatcccaaccctccccgccgtctccggcactccaatcccctccggcaaccgcgccggcgccagggatcaacactgttcctcttgtcccagtaaccccaagtggggcccccgcacccaccaccatcatccctaagggccccaccattgacatagtccaaatcctaagaaaagccaaaaggttctcagtcctcactcgccttctcaaaaccacacaactcataaaccaactcaactcacagctcgtaacttcaagctcaggagggttaaccctatttgcacccgaagacagtgccttctccaaactcaaagcagggttcctcaactctctcactgatagacagaaggtggagctcttacagttccacactctctcttccgtcatttccatctcaaactttgataccctcaccaacccggttcagacgcaggccggtgatgaccctcagaggctgcaacttaacgtcaccacttacggcggcagccaggtcagcatggccaccggcgccgtcaacgcctccgtcaccggaaccgtttactccgacaataagttggccatataccaggtggacaaggtgcttctccctcttgacctagtgcttcccagcaaggcgccggcaccggcaccggcgttggcgaaaaagggtttgccgaaggctgataaagggaattccacggcggcagacgatggcactgttggcggcgacgatgacagcgacgggaaggccttgccggtgggtgtttctgcagggtgtacgatgaagtcggtgaataacgttgttgttgttggagtggtgggtttggtgggtggagttttgatataaggtgagtgggcatgaataaagggattccataatttttgttgtgattttgtgagtaatatatgtattgattccatcgtgcttaattggggttctggtttgtggtagagggtagggtgaaaatgtatgcatgcatgcatgacaagctgggtttcttttactatgtttcttcttcttttgttttgataagtggtgatttgtgttaatggatttctggctttgtaaccggatttataaaagaaaaagttctgtgtatatatatttttgcttttcaaaatgagtattaattaattgacgatgatttattaatttgctgctgaagagtaattaacgacatgttcgtagttatgattgtctgatatgatgtaataactaattggatgcatggtgcatgaatttcttctttagaggaggtcgaggatcacaaattttatacttctaccaattatataacagatatgattaatgatttacaaagtacataggatttcattgcagtttataattgactcagtgatcacatattatttaacactagctaaggttaactctaaaattaatagaatgaaataaaaaagaaacatgatatgcaagaaatgaaagagttacattttcatagagtactgaatgattatttgttctgtttttttattcatcttctttttttagaaacaggttaatttgaatcttaactaattcaaaactaataaggttatttaaagaaatataaaaaatatatgataattaatagaatgnnnnnnnnnnnnnnnnnnnnnnnnnnnnnnnnnnnnnnnnnnnnnnnnnnnnnnnnnnnnnnnnnnnnnnnnnnnnnnnnnnnnnnnnnnnnnnnnnnnnnnnnnnnnnnnnnnnnnnnnnnnnnnnnnnnnnnnnnnnnnnnnnnnnnnnnnnnnnnnnnnnnnnnnnnnnnnnnnnnnnnnnnnnnnnnnnnnnnnnnnnnnnnnnnnnnnnnnnnnnnnnnnnnnnnnnnnnnnnnnnnnnnnnnnnnnnnnnnnnnnnnnnnnnnnnnnnnnnnnnnnnnnnnnnnnnnnnnnnnnnnnnnnnnnnnnnnnnnnnnnnnnnnnnnnnnnnnnnnnnnnnnnnnnnnnnnnnnnnnnnnnnnnnnnnnnnnnnnnnnnnnnnnnnnnnnnnnnnnnnnnnnnnnnnnnnnnnnnnnnnnnnnnnnnnnnnnnnnnnnnnnnnnnnnnnnnnnnnnnnnnnnnnnnnnnnnnnnnnnnnnnnnnnnnnnnnnnnnnnnnnnnnnnnnnnnnnnnnnnnnnnnnnnnnnnnnnnnnnnnnnnnnnnnnnnnnnnnnnnnnnnnnnnnnnnnnnnnnnnnnnnnnnnnnnnnnnnnnnnnnnnnnnnnttaaaatatttaataaaaataataaaaatattattgtttcattgataataaaaataaatttcaatagagaatacatggtatatatagtaagtttttggaattttttttatttttaagaaaagcttaataattaatttgattaataaatatgtttttagttgtcatttataaatttcttgttatattaatgttaatgaaagaaatttgagtgtcaattttaaaatagtaaaaactcacaaggttcataagacacgttacaaagaaagaaatacatgcatgtataactatataaactaaaattgaaaatacatacatggttttacgataattttaaaattaaaaacgaattctatgtggaaatcgatatttttaatttttttgaattatatatataaaatgataaaaacttgaaacggacaagcaaaatttatgaactttgggctttcggcctacgagctagtccaaaatatatcttgacttgatcaatttattgtttggtagctcaattacatttaatgttttattttgtccacaaaacacatgtcctcaacttcattacttgctaatacgattttttcctttacttattataacattattacagaggatttagcaattttgctggtgaataatatctataaaaaaactaactatttttagtgaaatatctcttctctttttttatttattacataattttacttggaaagaaaattaaaactgtagagtgtgcaatcatagggtattcataacaattgaagcgtaatatgtttaaaatatgtgtaaactaaaaattaatgttatctttatatattattataaattataattttttatcgtcttttacatacgcatttcaaaaatattataaaaaaactagttgtaatttttttcgattatttttttttattgtgggagcagttttagtaaaaattaaagagtacttttgaagtaagtacttttgtcggggggagtaattaaagagtacttttttaaaaaatactactacataaattcatttttaaaaaaaaatacttactgtgattgcacttagtcgctttcttacttacatattattagtagtactgtagaagatcatgcagcaagctatatagatttaattatataaaagattttttagttgccacatttcaatttcttacatctacatatctgtcaaaaacacatttgaaatcttaaactcagccacaccacacaccactgttctgttaagagaacaaaaggctttggtccaaaagtcatctgcatttttcagtcacggaagaggcaattaatgcatgtgctacctagctttaaacaactccttccatcttaattcttagcggtcaaataatagaaacacattaatggagaggataggttactggttagagattattatttgaaaaaaaaaaaaaaacatgtaaaagtagtactactgtgttttaaaagcccgtttgaaaattaaagtgccttagccctgggtgcgtatttgaaagggtgactttatgtggctcttcatcaattcattctgaggagcaacaaatgttatattgttgactggccctacttaattaattactacgtaagaaacaaattaagcagaggaaaagtctaagagatcttccaacatttcccactaattggcaagcaaattaagatagaaatgcacatttcacatgcatgcccatctagtgtatgttcatataatcatgtatggttacggttctaagaaattatgataaaaatgcaaaaccaaagttgaagtgggtgtttgattctgccttgcatcttaatttcgtatgtgcgttttaggtacgataccaaacatacacgaaatgagaacatgaatttaatattgtaaaacatttttaccatttaaacaatatcaatagatgatatatccatgtcatttgccgtaggacatagatgtatctatttttaaataacaataaagtcaaaggaggtgtattaatagttaaatacctcttttcctcatttaaggtttttatttttcttggcattatttttctgttcatgttagagagtttactctgatatattcataattttttaaagttactaatacttattgaaattaataaatttatcttttactaaattcattttctttaatataatattaaaataaaaataaatttaacaatgttttttttctttagaactggatgcgtatttaggttaaaagtttccttttaatagtgacttaatgcacattttatctaatttttaagagaaatatgttttcttataattttaaataataatttgagtgtgtgcttagttgatttttttaataaaaaaatcaatttgtaacatgatttttttttatactaaaaattaaatatttctttaaagaaacgtgagatatgcactaaaaaaattatacttaaaataattagcttaatcaaaattattctttttttaccaaatctttattattaattgttttgaaaaaggacatcacaccctcctttactttgcaaatgaaggtcaaaacccaaacaacctgcattaaacctaaccccttgggagatacccaattcacattataataacaataaaaatatataaacactcttttattttatacatcctctcaataactctcatctatatttttattatatcataattctaataaaagattttttctcattttcttctcttttgccatgtatatcatgggatgttaaacaaacatttttctttcatattatacccactaggccctatttcacaacaaactctgaccactcctcagtctcagggccatgtcttatcaagaaccccaaaactatactgcagaatctaattttcaatttccaaccaaaccctgcttatttttcagactaaaagtaaaaaaaaaaaaaaaaaaaacccgaacccttcaggcttcatcctggtgtccctatgatcgtcatcttccttcttcttttacaagttacagcaaagttaaacaattaaaagaaacaaataattaaatgggccataataatctgaatacaaaatatactccataatcatccgtcaaactaataaggaaggtcattttctggacggctgcattgaatggaatttcctagatagagaaaatgagggaaaaaaatttaattatttatcacccgaaaacaaaagtctttggaaattcagtccctctgttcccaccttttctcattcgtacgcggttcggccgaaattattagcataacttaatccaatcctaacttcatctcttcttgttttcttcacttgctaattttatacccttcaaattttccacagccaaactgtttcatagtatgccaccaccgtttccacacccatatctctcggccttcgaaatttcgctcctttccttcggggaactgctcagttcctgaaaccatcatctgggtaacacaagttttttgaaaacaaaaaagaataatctcagatggcttcggcggctatattctcgtcgctgcggcggcgccggtcgccgtcgctggaggcgtttctggtgccggtcgacttctccgacgtggcgctgctggagactcttatctccatcgccggcgacgtagcgtcctgcttctccggccaccggttccccttccagcgccggaactcgcgtgccctcatcggaaaagttgagattttccggtcaatgttggagtgtctgaaagactccgccggccccggagatcttcccccgacggcggtgctgtgcttaaaggagttctatctgcttctataccgctcaaagattcttcttgattactgtgcccaatcgagcaagttgtggctgctgcttcagaaccattgtgtttctggtcacttccatgatttgagccaagaattttcgacccttttggatgtttttccttttggggaagttggcatcagtgatgatgttagggaacagattgacttgttgcagagacagtccaaaagggctaagttgttcatagataagaaagatgatgttcttaggataaggttcttttggtttcttgaagagtttgagagtgggagggttcccgattctaaggacttgaggtgtttctttgtggataaactgaggattcttgatgctaagagttgtagggtggagattgaagccttggaggagcagattgtgaaccatgagggtgatgttgagcctacggttcctgtgcttaatgggatggtggctatcacaaggtattgcaggtttttgttgtttgggtttgaggaagagttggaagttgagattcaaaagaaggggaggaagaggttgattgctcaggaaattgctgaaacgtttttgactgttcctaaggacttttgttgtccgatatcattggatttgatgtgtgatcctgtgataatttccactggtcaaacttatgataggtggtctatacggaggtggatggaggaagggcattgtacttgtccaaaaacggggcaattgctttcgcataataggcttgttcctaatcgcgctcttaggaatttgattatgcagtggtgcagtgcacatggagtaccctatgatccacctgagggggttgatgcatctgttgagatgtttgtatcagcttgtccctccaaagcttccctcgaagctaaccgagggacgaccacgcttctcattcagcagcttgcggatgggtcacaagctgcacagactgtggctgctagggagataagattgttggccaaaactggaaaggaaaaccgtgccttcattgcgcaagccggggcaattcctcatcttaggaacttgctttcctcacctaatgctgttgcacaggagaattctgtgacggcactgctcaacctatccatttttgaaagaaataaaagcatgatcatggaggaggaagggtgtttaggatcaatagttgaggtgttgcgatttgggcatacaactgaggcaagggagaatgctgctgcaacattgttcagcctctctgctgtccatgattataagaaaagaattgcggataatgtgggagctgttgaagcactggcttggttgttgcaagaggggactcaaagaggaaagaaggatgctgtcacagcattgtttaatctctccactcacactgagaattgtttgagaatgatagaggcaggggcggtgaaagctatggttgtggctttgaggaatgaaggagttgctgaggaagcagctggtgccttggccttgattgttcggcagcctgttggcgccatggcggtggtgagggaggaagcagcagtagccggattgataggaatgatgcgttgtggaacgcctagaggtaaagagaatgcagttgcagcattgttggagctctgcaggagtggaggtgcagctgcaactgaaagagtggttagggcaccggctttggccggattgcttcaaaccttgctctttacaggtacaaagagggcaagaagaaaggcagcttcacttgctagagtgtttcagagatgcgaaaatgcatctctacattatggtggattaggtgtaggttatgtatttgctagcgattcagcttcaaccaggaatactacaacctttgtgagtgatgtttcacttccaatgtccatttctgttcctgttttatagttgtttgttgtgttcccgatttttgttgtaactctatcgattctttcattgaaatttaaagtcatcaagtataggaataccagatatgtattctaaggacttagagaatgatgcgttgttgaacagttagcttcaacccatttgtaatcagttattgcgagaaagaatataaagtgttctaaattggaattattagaccacctcaggcgttttatttcttctgtgctttactcctcccgttggcaatttattggatttttaagagtaatgctacttttttatatgtatgattcatgctccatttatgtttaactcatacaatttaaacttgttttgttaaatttacatggagtcaaaatgtgtgctattgtgctcaatttgttccttgaataaacagcatttttcttttctattttattagagtaacgatacattttggatataaaaacttgcattttcccaatgagggctactggttggttttttttaatttgtaggtcattgatatgtcaactttcttgttaataaagttttttatttgagcatggaaaaggtgtcacaaaatttaaactgatttaaaccgcgggaaagtgtttaaacgttaagatagtttagtttgttataactttatttatctagttgtgaggtgtaatctttgcataaagcggggtagaataaattctctttgttctcatgttttcagtcatcaaatttgtagttttcacttcagataccgtttgttgtgtctaagatttcaatgtgagttagcctcaagcgtgttgcatgcacgattattccgtgttaacattttcagctaattaattctggcccgtgaagtatatgaatgttctattctattatttggacgctatgatgtcactaacttttctgcctaacgtgttagaacgaatgtggatcacacaatagatgctctttcatcttgactcttcctttctttgttccattcctatgtgctaggaaaaaaaacagacatcaatatgtctcgtcataatgggtaggtatcttaaaatattcttaagcatatgatatgaagatagtgagaaaaaagctaaggcaattcaaagatgagtgctatttttggagattaaagtaattgcttgcttccattgagcggtggaggatgatgggcctaacatattattctttggcatagtggcacgtatgaaatgacatgaggggtcgccaaaggaggcgcaatttgatttgttttgattagattattagattattgtcattggttgatggcagcataataatagcaatctaatgtttctttattatatatatgacaataaaaagaatatgaagataaattgaaatattgaatgttccattgaaaaaagaaaatagatggaggttgaaagttttacaagggtgtaaattacccggggattcaataacaatctaaaatgtatgaaaaaaattattaatttttaaaataattttttaaaaataatttaaatagtaatttgtgattagatgataatataatataattttatattattagtgtattaatgttaaactcttaaagtccatcaagtatgataaatttaataattattttaaaataattcaaacgacaattcataattagatgagataacacaattttatactttcttatactttctatatatttagattaaactcttagaagataaattaagtaacaagatgttatttagtatggaatatagaaacatgaaattcataagaatcaaaaatataatgccagaggatagtctcaccattggagggaatagttgggaaaaaaaatctaatatcaatagaacatgtgtttgtacacttttgcatacataaatttcatccgttacatcattagtctcatcatgtgtagtatttaatattaaattttatccgttacttcattattctcatcatgtgtagtatttaatatttagtccaatttattttaggcttttcttaaaaaaagaagaaattgggttaaacaacatataaaagcttttctagaaattagctttatgagttttttacttctattcaaatttcaagatttaatgataatataatatactaaagaaattttatgttaaaaaattatggagtaattaaataattataatttttatctttaatttaaatttaaaataagttttaatctctaaaaaggttagaccaaacaatatttggtttcttttagttttactttctattcccacaccttcgaattccttctaagttcacttaattttgacaacaaaagaaggaaaaaaaaaaacaattttgtgatttttgataattatacgtttctttcttcagttgaagggatccaatcctcgaattatgtttcaaaatggtccaaaaagcccaaaaaataatgattgttatgataagttgtttctatcattcttaatgcaatgatcaaagccactcttgaccgcactattccaagctgttttcattaacctctcttgagaaaggaaaattgcaagtactacacgcacattcatgcttcgttgcttgggtcaattccattacatgaatattcttcatagtggaggcacacagagtgcacacatttaaaaaaataattaattggaggttttgtgagacacttttgttttgagacatggtggtagtcgagcttatcttgtttgatatgatgcgattgaattgttaacgatgacaataacactatatgattctcaattgcttcgttccaatccatccaccatatattttcagcccaagaagtggcacaagttattgtcttgggttctcattgttttctccatttgattgttgtgtaagatttttttatttttacagtgaattgtcactaatattgccccttattgacttgatgtattaagcttaagacctaatggacagagtgttgtgtcgttaggtttctagttaatagaccgtgacaagagagtttgttaagacttagaactaggtgtctatataagctacggttttatttattcattgaaaaacgcaccacaactagaggaacataggacaagacttaataaaagatttgtctggtcattagaaacgttttttcccctcatgtaataatgataaaagtgtcgtgttattttattgtaactcctattttcataaactaattttatgggtaaaaaattgaacctttatgcctaatttgatacactgatccatttgtatctttaattttttcaattttcctatacattaaaccctttcgcatttttaaaactaaaataatttatcggtccttgaaatttctacaataaaattaatttccatacattaacagtcccgttcaattcaaaaaacaagagagaaataaaattcccaaccaatcaacaatttcaaacaatcaattgaacaagttaacaagattgagagaagaaaaaaaaaaatacttttgagtgaacaacaaggacgaatgtcaatgcctaagtagaccagatccaacgatcccctccctcaacctcaagaagcttcggtgattccacctaactcaagttgggccaatgggtgtccagcacaaacctaggaaaacgaaaaaaaaaatctgacccataggcctacaggatgagaagtcagcccattaggaaaacacaaaggaaattatttctcacaccttccatttgcttcctgcacttattccggaatgtaatttttacactcctaaaagatctttctcgaatgtaattttacaatcgagattaggagttccaaaatcttaaaataggtgcaggaagaaacattggaggtataggaagcagccaaaacaaaacctgagcaaagattggtgttcaattactattgatcttgttttcaattagttagatgctcaagagaataaaaatttcaaatggaagcataactgtaatatgtcccctacatgcatattgattgggtttcggtaattcgaattacaatgtataatatcacaactacaaatgtgaaattaaggtgaaactaagtttgagtgtttttttgtttttataaaaaaaatagaaaataagagtgaaaatatatttgtttaaaatttaggaaacattttctctgaaaatattttcaaaaataaacttaaaattgaaaacaataaatcaatattttcaatcttttttgaaaaagttaaaatgcagtggcatcttagagtattttttttctctatacatgttttctaaatcttgaaaatttgaaaatgaagatgaaaaataaaaacagaaaataaacacacaaaccaagcatcacataaactgacttgactagcaaagacgtagcttaaaatagcaatggttttaaaaaaattattgctaaatcaagaggaatatattcacatggaagtgacaataaatagatcctttgctaggagatataagatagattgaatagttaaaaaagagaagaaaagaaaaaagatcatgaattatatcccttttacttaataatttacaactaatatttaccgataaaaaaatagacccctttactatgtttaatcatataattgggaaggggtgcaaagagaggcttcccttcttaagcaacaaaaccggtagaggtaattggacttataagtcttcctattcaaatgattagttgaaacataattattgagaaattcagttaaacaaagaaaaaggagttgcaattttcttcctttataatattgtaataatacccctttttctcttgcagtatcaaatgcatacatggcatttcatgcaataatatggaaatgatgaaaggattctttttcaattcaagttaataaaaaatgcctagatcacgtcagaatgaaaaagaagaatggaatttattgtcgagttgaaggatttattgtgtaagcgtgaaaacgaaataacttgaaaaaaaattgtgtccaaaattattttatgtacgtagttcgtggtttgggccatctatcaaaatcggcaaccgaagaatcaatttgatgacctcttttgttgacaaaatagaacacaaccaatttagaatttcataactaaccgattatttatctaccctatggcttttttggtcttataccttgcttggaaatgaaggttcccctgttgaccctaagaaccttatttcttgtgttggaccttaatagctcatacatcataatttggaggagacaatcagaatcacatgatataataactgctatgacaagggaccattttctaaaatggtagatattgtgtcaagtttcttttgcataatcacatcaatttttcttctaaaatagttcatatgtaatgctggcacagaagctcacagaggatcaacattatcctttgataattgttgaagagggagcccacgccctttgaattgtcattgtttatctacttttgatatgcgtgatttgagtagaacaatatgatcaaaactgtgtatttttcattagaaaattagaagtaaataaagtaaagataaaaagtgtaaatttaaatacaagtaaaaaaaaagtcgctacaaggcatatttttgtgcaactcaatcaataacacttagttacattatgactttttttaatacaaagaatgataaaatacgaagacactcaattactagcagaagttcactcaaaatattattgcagaaagataaatagcaagaagttttacccaatgtttatgatcaatgttatataaatcaaactaaaagttaaaaagaaaattgctttttagtacggcattttcataagaatgctcacggatgacttcataaagtactgcagagtctgcaaattgccttttattttctctctcatgtatggttaacgcattcaaatgattggcaaatttttaaaatattaaaataaggaagtgtgtatttttcttcaaaatataaaattttgatacaggtatatatgactttagtaaaatgagaggatgcatttatccacctttaattacataggtttataggtctatgttcctattaatattgtaattgtgtaacttatttctttataggtcagtcaaatagattgtactttcatggatgataacatggaatttgacatgagcataataggtttgttgacatgatttaatattacttttgattcatgtatcatgagtgtgataccaaagagattaaaagtgtaattaactcacgtcatgtgttaagtaatatatcatcgatcagggtcggttctgggcccattcaaggggctcaaccgcacaggacttcaaaaaataaagggtctcaaatattaattattgtaatatatgttcaatactgaaaactagaggaaatagtaatgtccctgtcatcgatataatattatctaaagtcatgtcaaaataatttattaaatatttaaccataaattaacaagaaagccaaaataccattataatagctagaagatctaatttgcacgattaagatttaggggattaaaatcacaatgagacccgactaataatatgaaggaggtgattgaggaacaagtatcgaaaacacaatatttatgattgagtaaggtgcaaaatttgacaaaaatatcacattttggtcgcctatgaaaggatcattttacacgcctacacagacaggactaaatttggagcaccccaaccgtcaaacattctgcttaatcgtagtagtagtagtgtatgctactaacatgtgtgccagtatgtcacaatagtaatgtccaatgagtctttgaccgagaagaaaaagtggagaaaactgcaaataaataaagccaggaaagaaaaagatgagacaaggattttgctagccagaatcataagaggaaacactcccagtccatcacaatccaaaaagaaactgttttattctttagtcttccaccttttactaatagtgaaaaacaaagttaatattcaaatgaactgcaacatttacattcagctaagtaggaagtaactgctgtacaaaatgacatttactggtctataattctagttcttattgttacaataaagttacagacaacatcttgtataatgttaagtgtccttcaaataaaagctcatacaatgacaatgtacccggttcataataacctataagcaacctaatttctggttaactgcttctattacggtgtatgtgtgggcctaaaaaggtggtccaccccttggcgcaaatctttttttgtgtacaaaccaaaaagcatgaaaagtggcaaaagtggtcacaggaattggggcgggtatctcttttgaaaacatagcagaaaaaaaccagtaagaaacccacgttcctatttaacagcctaaccgtcccactaactgctagaactctctcaactctcactatgcacttcacttctgctctttatcttctctgaagattaataaacccttcaccaccaaatcaagagagtttcaaacaccaaaacaacaagagcagattatgaagtggggtggaaaaaagccttctccttcttcttcttcttctaggccttcttctttcatatctcatgtatctcctttttcatggctttccaagttcaagcagatgagaatcaactcagagccaaaacctggcacactgaagcagaattctactccatctgattatacttcaaccaattatgctaatataaatagaggcaggttttatggaggggatgatgatgaagctttctggagactctcatttggagaagagggtggtaacgagcataggaaaagtgaagatattctgaaaccagtaaagtacaatttggatgctgaacatgccattccatcctcaagtttccccactggattaaataatgctaaaaggcaaggtagtagaaaagaaggcactcagaagatgaagcagaaggacactactggactgagagaagaaacaaaattgttgaatgaagcatcaaagagtataaaggaagttgaatccttaaggagaagatatgagaggaaagcacaaagagttttgcaagagcagctcttgaaattggaaaaggcagaagatgaagctgagtttgcatcaagtccattcttaggaaatgatctgctgcaatttgagtcaccaagaacaattcgcacaccaagaaagcatttttttgtagattcaaagagttctggccttggaagtctcggagaatctcgtgtgtgtagtcctcaattgggttctgagtggcaaagtttgaaacaaactgaggggttgaaattgaaaccaaagggtaaccaacaaaggcaatctcttcatgtgagcagagaaaaccagaggaggaaaccaaagcacaactccaaggttagagtatattctccaaggatgggttccaaggtcgaagtccgcaaaataaaggtcatggaagagaagaagaaagcaaaacagaagatgaagaaagaagaggaaattgtggaggaaacagaagaagggttagatagctttgctgtggtgaaatgttctttggatccacagaaagatttcagagattcaatgattgagatgatcacagagaaacagatcagcgagccagaagaaatggaagatctgttagcgtgctatctgactttgaattctaaggagtaccatgatctcatcatccaagtgttcaagcaagtatggttgtgtatgagccaagccagttcgggtattcaatcagacaagcaatgttgctgttgtgattaacaacataaatgtttggcttgtaggaaaacattggcagaaattgtaaatagttaatcttgttctagttgtgctttattagctttgcttgaatttctttattctcttcacatcttttgtataaaattcaagagaagttgcatcaagatcccaacgaaattcatactttataataataataattataactactagtaagagttctttgtgcatgtatacctatataataccaagttgtttacactcaaaacatgattatcttgttggggttaggattcttgtaagcttgtagcattatgttcattctttagcaatatttttaatataggctctagggaaagaagtctgaagcactgatgagaggtgaaacttgttgaggaaataaggaatctaaaattccaaatggtaaaaatttccaaaaatagagaatgcacctataatacacataagacattgctgctttgcatatcagcatggtcctagacattcacatcagtataatacccataagacattgcccatgccggtggaagaaccggggttaaatgaatgaaagggaaaggaaactattcttcaatccttgtgatcagtatttgacaccaacagatacctttagcatgcatcttattctggcaatacaaataaaataccctaagaatgtgacaaatactaatattctgttatgctcagtgatttgtctgcatccttaaaaatacatggctttaagattagttaggcttaaatttataacttaaaaattaaattctgatatggtaatagattaaaatgttgtgctttttagttaatgagttgaatatgttaaaaggtaaatctggggttctttaacaaatgaacttgaacttttgattcatttagtttttatttattatttattcataaactaaacaagtttgatgagcaggtttcactcattgtaagccctacacaacaaacggcctacttaaataaattagcgtgcctccctttgaagacacccgacacacttcattgaagcctctatgacatttcaaaaaacatatcttagtgactgacccattcttcataaagttgataagctcttgtagcattgatgaaaatgtcatctaagagaaaaatgttagttttactaataaagcttcttataaattctccaactttcataagtgtcagcaggcatgttgggaggcacattaggtgaggccatcaaatggagtcatcgagtgagtgaaaatatttaagagtttgtgagatatatttatcacaaaggtaccctttctgatcatctatgttagggataaataaattatacaacctagctacaatgcaaatactatatatttctattattataatctacatctacagtatggggaaattattaggagaccgaagtgtatatcccaataccttaatttgatgactattatttctattgtgtaaagacccattacctaattactttcaagtggggcatttatgccacatctacacaataccaaattagttaataacatcacaataagtcccaagtttgtatataagatcaaagcaattcttaaagtcaactcggtggttacttgggatacctataaaaaagcacaagcaataaagttaacctacctgctaggggctcataaattggtcattcgactttaatcatgctgctgcaggtaggctttacatgatcaaattaattttttcatttattatttcggcatcgatcattctatatatgcatgtccatattaataactgaacataaataaaactatctagatgtagaattcaatagattttaaactaatcaactaataaagcattaaagttttatcttctaacatctatttcatgaatattggtcactcagagcgttgactagccatccgaaaacacggaaatttttctttgaataaaggcataaaactcatctagaactatagttagactgcggaaaaaggatggaatcaaatcgtactaagttcaattatttggattgttaaaaaagaagataaaatacatccttcctccaattcagatatcgatgatactggaatcatctatttcaatatagaatattcaaataataaaatagtaaagttattttatttcatattattgcactgcatttttcttctataccctattccattctattttaaatttatcattgtatacccaaacttataaactatatttttattgtccatcgtgttttgaagagagtaaaggaagttgtgtctatacttcaattttagtaggctagccttaaacgattacagtcttatcaatcaattcatttaaaaataaattaaatagccctaaagtgaatttgtttttaaagcaagcaaataaaggtttatttattctaaatttttaatatgttgaaatcacaatttattttaattaaatcagttatacatacatttttattaattgactttacagataaaagttttccaaaaaaaatcccttctctagctaggggaatatatatgttcgacacacaattgacatgcttttccacacaacatctgcatacaaacaaatcattaaccagcagttataagtcagagaaaactagtttcaaagtatagtattatatttccaaacattacattcttagaaatattatgtatataaaatattgaaaaaatagaagtagaagaatgaaatgaagacatgtggttactgtattagttgttagtttttttaatactcacaacttctctctttcctcttcttaattgtgtataaaataactttcattctcataaaaatacaatatacatatctttttaccataaaaataagaagacaaatatgaatatttatatttttgataatcaacaatacctaaacatattatttttcaaaacttgtaccatgagaatataataattccaagtcccctcattggaaatatttcttttgcaccactccttttccctttcattcaaacttctttctccctctttctttcatatctctcgattagaaaaatgaaagttttatacattatggaaattaaattacttagctaaacaagaaatttgatacacgagattatgagaatatagaattgcttttttaaaatgaaatattttgaaaataaaataaattgaattgaactaattaaaatgtaatgtcatatatcttaaattcattaaaatttcaaaaatcctttgttctaagactactttaaatatttaggtgaaatataacaaatatgatattattaaaatataacgtctttcaacttgaaaaataaaattattttgagacaaattaaaatatttaaaagaatatatgatataactgaactggttgcttctttgtaaatgtcccacgtagcaaacaaaataattatcgtttagagtcaggtgaagtgttttaaatgtacttgttttattttattttattttattgagacaatgtcattcacaatagaccggctagaccaagtgggtcgcatgctacaatccacaagcattccctatagtctccatataagatcagtgtgctttcattttagtggttcaccatgtacatatggaagaaagagtaactgataattacatgaaattgtgaggaacaaataaatcattattaacattatgtacaaaaagaatatttaaactgtaccaaaaaaaagatcatgattaacatttagaaaaaaaaaattatcttagacatttacattacagcacactgtatacaaacgcaagtatacaagagaagaagtgaagtgatcttggttttttaaaattctatccaaaatagctaaggttgttttccttctcatgataagaaaatcttttctgcgccgccatttgcccactgctcacaggatgaataatttttaatttaacctttgatgatatgaacctaagaaaacaaaaaggaaagaaagaaatcaccattgcaaacagctctcctgagtcatttgaatgattttcattatgacataaatgacaaaaatatatttcattttctatttttatttttaattacaaaaatatcactttatctcttgttttttaaatatttatataagaaacaataaaaaaaagtaaattataatagcatcccctcaagtttacttgaaattaaacataatatccctccttttttatgcttacactaaatttaatttgttttaaacattatattaacacctcttacgcattacattaatttttttaattatttgaaaaatactgcaccttatacttctataatgggttgttataatggtaaaaaaggggtgtgtgtaatttaaaaaaactccaagatgtaatttcaagaaatctcagtaagtcttgctataatttactctaaatataataaaaaattattttcattgttttttatatgaatttcaaaaaatggaaaacaaagtaacattttataactaagaataaaataaaaaaaatattttcttccaaagtcataggttcttatatactttttcttatggccgctaccgctagctattgctacttgtagccgctaaaaggtacttgcagaataacaagtggcagaaagaaatttattaacaagtagacaaaaattaaatgcaaattttaaagagatataaattgtgattgcaaagaaaatgtttaaaaaatcttaaatgttttcaaaagaaaaataaaacttactgcatagaaaaacatttgtaagttaccaacttagatcatgttttagaagatattttaggtagtttttgatttttcttttattaactaaaaaatttgtttgattatttgataaataagttattttagtagtttttatcattttttgaaacactactttaaataatatttttaaaacgctaacttttgatatttttttcatttttattctcaacacatttattcaatttttttattatcttttttaaataaatcatgattttattatttttatgttattttatattttcagctatttcaacaattaattttattaaacaattataatttaataagttaattttcagctattagctcccagcaagtttttcaactaattttatcgaatataaccttaatttcttttatcattgatacaagtccaaattatatttatgtatttcctttcaaaagtaattacatgcaatggaatcccttaagaataaggtttttggaattggaaagaatcattctccatgagattcttagttacattatttataacttttttgttcatagacaaaattaattcaaaattattttccattccaaaacataacttatttccaaacacttcatatttaactagaatttgctcccaaaaatataacccttccccttcatgaaatcccacaagcctcttatccattctcaatcattattcaatcataacatacatacaaataaaactttttagattagatttaaggatgatcagactacaacttataacttccaccacgtcatgttcattcataatttaaaagggaccaccccctaatttgaaagggcaaataaaagatagttccatggcatgtaataggcaaaaacatatcaaatcagtccgtggcatttcatgtgcctcttgctcgttaattatatgttgaacatgaagcagtccaatcaaatgaagagttacatagtatattaaacagcaatacaaattatggatttaatttgaatgagccatcaaagtaatataataaattttgtcacaacatttaattagtttgacctatcatgtatgcatttaattcatgaggtgacaacacaacatcaaataaaatataaaactttattaaacaaagagtacaccaaaatttaaaaacacaaaccaaataaaattattgtaatatacaatttttaaaacaattgtttttatttatgtagttattttcttaaaattacaaaaaattataattattactcaaatatttttcttcaaaaaaaattgaataacaattattttagtttttatatttaactaataatatacattaaatttacatgacaaaattatcacaagacaatgtgttgaatacaaattttatatgttagtacagatgttatatttatcatatatgtatattgttattatatatatatatatattatgatattcaacatatattataataatacaaagagacaaaagaaaaactatcttaccatattttctaactcagctcactctcaagataaaaacaaatactagacacaacaaataactaattgcaacaagggaaatacgaaatataacgttggttgggttgtaaaaggagaacgaaggaaaggagggagaaccaacagatccttaacaaatgtttaatttaaactccttacctgaaagtaccaatgcaaaccataattttgatattaaacgaaggatgaataactaaatccagcagccagtggtaaaattaaaggtatttaacagttcatccgcattacaccagagaatcaaagccccgtggcttacaagttacaacataccatttcaccagatattgcatggacaaattaaagtcaaaaagcacctttatcttagctggtttctgctaggatttccacttgattagtaagtcaaacttggtggttctccccctccccccgagaaaagcaagaaaagctttgccaagttaggatcaattagaaaatttgctttctaacaaatggcatagcaagttagcaaccaaatataatgtggtatgcatcgactttctattctttgcttcagcattagatattatatataatgtggcctaattgcatcgacaagacgcatctcataatgttcgctactcagtaacaacagaaagatgaaatccataaactctaacgcaatcaatatttatcgaaaaggactatttgtgtaacttttccactcaactgaaaacatcaaactgaaccctgatagactgtcactgataggcaccttgtcctcaataaattgcttaccattcaagaatatatgccatatacgagtgacaacttatgatcctgctggtttgatcaaatatttagttttcatttcttatttttataaacaattacaaaaatactactttgttttcacttcatttcctactatcaaagatttgtataagaaatggtgaaaacaattgttttcaacaccatttttgtcaaatctatgaaaacaagaaacaaaatgacaaggcataatttttatatttttttttaaacaaataaaaacaacaaataaaaggttttctcaatccaaacaaatcctaaataaaagctaatttctaactcataatcttagttagccaaatcaaactcaaaatgaccacaagtaactggactggcataattgtttgttgggacttgggagtggttttattaattatactagaactcagcttaaacttaacataatagttgattgtagtatatctgccagagaaacccccctttttgacattaaaagtatgataggttgacaaaaatgaacagctctggccaaacaggaaaggatatatttttcaatatcacaatacatcctcccaccaccctacccagctccctaccttttagccttcgaacactagttcaacacccaagtatatactagaagttcattttccatcataggttctgttcaatccaaggtattttcccttcatcagtttgatgattgtacactagtttaacattacccttctagaatttcttcccatgaaccttgtagtcctctgcttaggctcacacactttgtgcagtttctggctactacaatattatagttgaattgacaagatgtaaatccctacaaaaaattattcagtgaacaaaattgaagtagaagtactatattgcatttcccaaatgggaaatcctagtttccacttcaaatgcaatgtatcaataaattcaagaaaacaacagtctattccattccaggtcagtaagacatactattggtgttcttagtttcaaattatggacgacattattgtggttgcggtaatgtccacaacagcaacagaaccaccctgcaactacaggacaatttccattcacaaaaaatggaggcaaaccaacaaccaaaagatggaaacagagggtatcagttggcagcttctgccatatggtacaagtaacatccagaagggaccaaaggaaaacagaacaaatgtcgactggagataaccataccaaggttctaaattgaggttatgatcacagtcacggttgcggttgtagtgcagtacagaagctgcatgatatggtccataatttaaaagcttgaaccaaacgacagttctgtacaaggcataatagaactctagaagagacaaaagagcggcatacttaactaatgaatcaatgagggatgcaacattcattccacccaaaatatggaatatgtatctattgtagagaaaaatcagaaaactgtgcatacatatatttattacatgtgattgtagaacagtacaagcaagaagaataatcaattgctactatgttttctctgcttgaccaacatgccccatctgttctgaaagattatttgcattccgtttgttccaccaaaatttgttaaggtcgctgggttttccttcattctttctgccatcatattcctttctttctgactccacttcctgtgtttctgatgcaccaggatcctctgtcaagaactgctcccagaatacatcattaacaccagttactgcaacagtggttcccgcaggttgttcttttgatgcaacaggctcagaaacagcagctgtagttggctcagaattcatgtcaattccaggtgacttaggctgaacttcaacatctaattgcgcacaagatatagatggactatcagcacaacttgtagattcatcaaaatccatgtttgactgaatttggacgaaggtgccaccaatatcatgtacaatagcctcccaaaacgccatggatgattcaagctgatccagtcgctccacgtttaatgtcaagacagtgatattgtctgcattttctcttggtaacatttgggaagcttccatagcatcttcaacactagcttcatcataaaagtggccacttctcggcaaccttcgttttctatccatgatttctgtcagaggcaagatatttacagaaatcacaggtttctgcaatacatgagaaacagaagaaaccatcctttgttgattctgttccaacttttccaactgatcttttgagcaatgtatttgtatctcatatgcctgccactcatgctgatatttctgtaattccacgaggagttgctctttatcgtgtttaagtttctctatttcatcagtaaaactctgcctttctgcctcccctagtgggccttgtgcttggagattctgcaaagaatggctatgaaccggcttccgtctatggatgttcttcataagatgaggttgccctctaacaaaatcatcattggcaaattcccattgttctgggtcaacttttctaaatccctgctcaagtaaagatgctaccactaagtttaagaaactaaaagcagaatggggcaacacatacaacaacacaaaacaagtagtattcacatcaacaagaccaagatcaaatttgcttacatatgtgttcagctgcctgatgaaacttgagaagttgttgtgcttaaagaatctaggcagcaaatccctggcaaattcagggggattccatacaatgaaactcttgctagagacactccacgaaacaaccgaatccgtggaaggatcatccaccatctcataagtctttgcaaggaaagggggcagggaacttgaactaccctgtgtatcatccatcactcgaaccaaacctcaatcaaacctactccaaaatctcaacctccccaattcaaaactcaaacaccaatcaatttccaaactttcaaaagaagtcaacccttaattcccaccacgatattcggcagaacatcccacaaaaaaaagaaactttttttctttccaaatctgacctagacaaaaccccaaaacaaaaatttcccacttacagcaaaattaataatagaacaatcatttcaaaaccccatttgcctaaggagagcaaccctaaacccatgaaatcaacaaaatcacaaggcagaaaaagttttcagctttctctcctctcttacctcaaatacctaaacaagcaacgtttacgctgaaacaaatctcacagaatcatgggttgaatttccccaaaaatgttaacgtaggattcttctttccctggacgggaaaaattggagaagcttgcacgtaaagcaacaataattattaattaaaaataaaaatggcagttacgttattgaagctttgcacctgaaaaaggaaagcgaagagtgaaagctgagaaatcgcagagagggaaaaagagtttttttcttcagtttctgggtgattccatatttccaattgttggaatcctttcttcaattttccagttttgttattggggtcaacgcgtggttgatttggaaaggaggggggtggtaccataggaataggattttggaatgaaaataaaagtaaagaattgctattggtgatgtatataaaaattaaaagcaaatttaatactatgagaattagaatgaacgacgatataaaaaaaaaaaaaaaannnnnnnnnnnnnnnnnnntgagctttaaataagtgagatattaactaaatggaaaaagaaacttaaagatacttttaatattattatttaattaaaataaaagttttagttcaataactaatattgatgattctcttttatttactatatattattgaagtaaaaatttaattctaacaatgaagtgcatcaaaagatgtttttatctaaattttattctattaaactttataattattatatgtagggataaatataaaattttcaaacatgagaatggtcattccttaggggaccttgaaaatgatctacaattaaaattgacatttattctaacaacaataatatttggatgccttttaaataagaattaagaattgtcgaaatttaataaagacttaatttttataacatgcaattaaaatttaataatatagaaattaaaattttattatatacaaaaaataatcattggacaaacgtttactgataaaaaaaaaaaaaaacnnnnnnnnnnnnnnnnnnnnnnnnnnnnnnnnnnnnnnnnnnnnnnnnnnnnnnnnnnnnnnnnnnnnnnnagggctttaattatctataacaatttataaataatcactaaaagcaataaaaaaagaaacataatcaattacaaacaacagcttccatgaatgcttttagtaactcaatggtctctgcctatctggttcaccaaatgctgctcccttccattgtgccattaatccattatgatatcgttcacataaatgagcaaacgaagctttatggaaaggttcgcttcaatcgatacaatccaagtgcgagtctcaggaagcaaaatattgatacagcacatgtgaatatagtttttttgtcttttttgggtagcatgttaatatagtatgaaaacgtgtagataccaacaaaatacaaaataaaggggaattttccttccctctagtccctagatggaagaagatacatataatcatattttagttttgaatataataagataaaaagaagcattctgaaccattcaaaagaaaatataggttatctggaccacaaaaaggaaataaagaaaatggtgtgtgaaatgggcttgcttaaaaactacactccagataagaacattgattattagcaaacagtttcccatacccgtctctatcttgtcgttaattggttattttatttattaatcgattgttactttgcttgagatggttatttcgggagatgatgatgtaagaattaactagatctatagtctatattaacctaatggaggggtccattctaacaaaacagtagcacggactgaagccacatccatgaagcaatcgatcaccaatatataagtgagataacgtattcaagcacgcaaaaggtggaagagtaatggttaactgttcattttagacttttggtgatagttgattgtaactaactgaccaaataatgtttgtttgttattgaggataaaaacgttcagtctagaaaaacttccactgaagagctaaaactatatgctcaaagagtaggacttgatatacaagcataaatgaaatcttcactttacttatcagatcgtgtggaggttcacaataatgattaatgacatgttgatctcagtcataccaccaacaccaagaacttgacttctatcttaaatcataaatgattccctttgagccaagtcgccattccagttctttctagtcaaacccattggctaaatgacccttgcaatagaatcctcaacaaagtaactagatccttttagacgttttgcttggtcacatacatagacatatggattgttatatgtggcacaggtatgcaggacaaaacttttcctaatatgtggtaaacttagtcggttcattatttgggatcaaaatttgcttaggaatcgatttctatgcatagactccaataattgaagaggctcattttagaaaactagtcatggcctataattatgtttaagtatattttctgatgctagagtatcccgtatggccaactttttccttctccaagacattgattacatcccatatcactcattcaccctcaggaaaatagccaccgtttgagtgaaaaccttttgcccacactgcactatcgccttccaacataggtacaagtgtagaactgaaactggtatcatccatacttcagtatcttcatacagtggagaatcattatggaaatactttccaagctttccaagagaacttaaatgttccatctcatctttagttactctagatttagtaacatgatccctttctatcaccacccacgccatcaatcagtcaatggcatcaaagcaccacatatcagtaaatgaaaattcaagatgtttgaagtcacaaaaacaccatccactaaaaacacatcatcaaaatcgtgagagaaaaaaatccagtttaccaaacacaaacaaatgtatgtatatctaccaaaggagggttcgaacggagatatataatgttggtgggtggtagctgttgagtcatttacaaacataccaagtcattaagtagtatttaataaataagagttatcgtttctacgaagacttgcacaatacttagtaaatatcaaaagtttttactatttaaactaacaaataaactatgttgatttgaacataatatttaacaataaagataaaacagaacaaaactacaaattatgatatttttgggattttcgacaaacacatattaaaacgatatgaatttcagatcacaaaggttatcagggttagatatcaccgaaccaaactctctttacgctaaaacatgatattcaacttgtaatccaacgttaatatcgaccacaatttaaaaacagtattctaatccctaatttcttaggtgaaaaaacttaagtttctctcttaaatgtcaatcatttgaacaattaacaaaagaacttgctttaagctcgatgacctaaagataaccattatccctcatcatattcctagctttgaggtttaatggccattttatcacagttcaaaataaagaaagtattttctaatagtaatctcatccaagaatcaagctatgagtgaccaaaaacaagaaaaaatggaggaacaatggaagaaaagagttggggaagaataaatttttaaatgaagtgtttttacaaaatgatgaagcgtgccctaaaataaacgagataatctatttatacatttccaaaaaatctacacttaaatgagtgtttaaacagttaatgtagttatacaattctacacatctgtctaaatttagcttaaaccaaaagttatttttatgaagttaattttttttaactttcttttttatcttctacaaaaaaagaattttgatttatctcctcgaatccaaacttaagtacatttgagctaaaattttcactttcagctttcattaaatcttgctccaaaaaattgtaatttgatccaattcaaaatcctacaaaatgatctattaataaagcatgtgaaatctaacaaaataacaaattaaaaagaacaaactataacttaacaatttatatataaaaaacataaataaagtcctaaaaataagaaaaagatgaaataattatctaaatttatatgtctcaagttaaatatttttggcaattattatagtcataagagaaactagaaaaccctttaggataaattttctgctacttggacgtgttccttaaaatctgaattgttaccatccattaaaacaaacaagcaccaaattttaccatttaaattttaagctgtatccaagtgtctctctgtacacagtatcaacataaagatcagccaaaacagtcagaaaaatcacctttgcaaatagctaactaactttctgataaaattcaaattaatgtcagaagaacaaaactttcataatcaaaacggaaagggtctctatttaggtgccttcatgtcaagcagcgaatcttcaactttccaccctggccacatattatccggtttctgtactatataattattgttatatagtcatcataccttgataagacgggtaaactaatgtttggagtagaattacaaaccaaatattatgcaaaattaaattataaaattttacaaattaaatttctgaagaatcttactataatggagtatatttcaaaataactttttctgctattaaaatattaagtgaattttagaaattagtaatctgcactaaattttataaatataataaattaaagcaatccaaacctgaccaaactccatgtaattttaatattctaagatccccacatgacctgacccagtcacgttgcagccaccccccgagtttcaatcattcaaacaaatattgtctttccaacatccttttcctacatctgaaggtccactttccaatatcagctttggttctgttgtaagtaagaaactgaggtggtttagcattaacaaccactttgaaagctgaaatcttttttgaggtttgcatcatccaaaaatggtgttgaagtccaaggcagagttccttgtcctcttggtccttgttgtgtgccaaccctcttgtgggttgggggaggattggtctactaggagactcagtaggcataataataagatgatttctccaagctgtggagagttggtgttgaagtcacagtgctcagagaactcaaaatgcaggtggtgcaccagtgaggaccttgatgacatgtgcttctctaaatctgaggcattgagattgcctcaccaggttttctcttgtgccttcatcccctgagatctattctctcttggatctcaggatctgtgttgcctaccctacactaaccaattttcaaggactacttttattttttgttgtgtttatgtcttgttttttgtgtttttaggtatgacttgatagagggtggcgttgttgttgtatattcagtttatgatttacttcaaatttgagacatggttagggtatatagttgaagatagagaggaaatcgccacattctatccttttgcttcattatctgttgcgaaagcctcattcaaatagctgaatagttcatctcagttcatttacatgccttttgggggcagctcagctaacaatgtaaaagcttcaataaaaacagccaaaaaaattatcatatgtttcatttttcatcttaaattggatgataacatgaacactttagtcccctcccccattgctttgtttttctagctactagaagattacttagccgattttcattattataagaaatacttggtgccattagaaaacctgtttacaaaacaaactccctgataatgttgttctttttggccagaaaagaattttttttttaatgctaatttaacgttttggcttggcttatcaatattgaaggaaactgctgtctcctctgttaataatgctgatggtgcttggtagaattgaaaataggagttctggttttaatgctattttaactcttagatatctaataagataacatcaagatataatgcacaaatgacaagcgcaggaaattccaggtttctggtttcataatagtttaatttgactttgattatcttaacttttatccaggttcatggtgataaacaaagttaagatctcttaaaatgttaatttgttcaaagtcaaacaaagagatcttaattgtcttcctggtagcacaaggaagacaattaacatatcttaaaatgttaagtcttccctgnnnnnnnnnnnnnnnnnnnnnnnnnnnnnnnnnnnnnnnnnnnnnnnnnnnnnnnnnnnnnnnnnnnnnnnnnnnnnngtgatttaaatgtttaaattcattagtcaataagtaagtttagctttgatagctgttaacttatttaattatttgaagccattcatgaaaattcccatgttatttgaaactgcaaactttatcaaatgtttgagctgaaacaattactgacatgtttacactaaacttatttaatgttcaattcaactcatttgttttaataaatattcaaatttaactttgactttgatctttataatctaaatgagtcacgccgcccaatttatagccttgaaattaaaagtctataaataactcgcatgtgcatatatagaatgttacaaaaaaattgtaatttcatatagatatgtttagttaattgtagttttatcttaaatttttatcattttttaatctttatgtctaaatatttttctattctctttctccttttatctttatgaaaatgtttattaaatacttatttaagaaagggattttttatgtacatatatagacgggaaaattgaaactaaaatcttatataaactacctaaatctttctaccgctaatctgaacctggtgataaagggattgttaattgtgtgtttatgaatccccaatagaaaatctaattaataaacttaacaaaaaaaacactctaagaagtaagaatatagttaatatataaaaatagtcatattctaaaaggattgagtaaattaaacgtaaactttgtatattcttaacaaataaattttatattttaaatttcactcgttttaaatgtataaatcaaacttaattatcattttttttcaatcaaactaactagtgtcagctttttttagttgtcttcttataaaaaaactaagaaaagatatccatatcaataagaaacgggccaaaaaagggcccagagaacaatttaaggagtggcccagcagcatacaatcgcttagcgatattttcttcctccagccagcatatttctcttactgtgggtgtatgaagaaatatgatgaatgcagaaagaaaatccctccttagaataggatcataagcactttaatcatttgggccttagattcttataagagcttatagcctcaacagatcatacgcactacatcccaatttacgcaaacacgtaaactttagaaaaaccttaagaaaaagtgaaataagaagactttctagcagaggaaacaaataccatgataagcaacacaaattacactacaagttaattattattttcaaatcagtgtaacttacttttgtgggctccacaaagataatttaaggacgttaatcgaaaaccttgacctgaaatgaatggagttacacttattgaaaccaccccaaacaatcatttaatcaaaagtgacatataagaagctattggaattgaattaatagtgaaaattttaaacagtttatactaaatcaaacttcattgtcgttattaaaaaagcatgacgtgtataagtcattgtctgccacccaaatattaaatttattaaaagttatccacatgtttcaagtttcaacttataaaagatcatctctttacgaatccattgagaaactctttccaaaatgatactgttcagattagtgacgcgttattcctgtcatgttgtaaaggaattggtggggtcaacccttttttttcagtcaatttaattttaactttaaatttagtgcatttagtgtaaaaacaattatattacggcgtatcatctaacgatatgtataacattaattaatacattacagttggcatattattaaatttattgagtaatgtaaaaatgtactattaaagcagtaaaaaaatgttctattaaaagtgtaatttttgtaattcattaaaattaaacactttaacttgttgttcttgcaaacattttttttttcatttcatgatagaaccatagaagaagacttcaacatgaccataatgagatccccgatggtagttacgtgtaaaaactctcacactctagttagtgagagaacgagggaatgtaaaaaatgagattagattcatatttgatgggttagaaacccttatagaacaattgtttaagtagaaagttagtgaatcaacttgataaggttaacgccaataaattaatctaatttctaaaatatcataaatgagtttcttaatatatatatataatttcataaaagcataaaaaacttaaagatgaaaataaaattaactcgatacaaatgtgtacttcaatcactttttcagaagtcttattgatgataaaatttttgagagttcttgtataaaaatggttctctaggctactagacatttcatttctcttcaacggggagaactaaacaaaaataaattcttgtttataagaactcgataaaaactttgtttttggagatggactcaatagccaatgacatcaaacattttaggcatttttgtcatttgcttacattttttttcaggttgtgttcttttttttattattattaaatttagctagatgtttaattaatagtgtcaagatggtagatcttgggctttagcttcacgtgttaaccaaaaagaatttaattgaaaaaagaataattaacaagtgtatttaacatactagttaaaaaaatgtcaataaaaacatctaatatttattttaagtgattaaaatattaaatttaatttaataattagatgtttgttaatcacttgataagacccatgttttaaaagcaatggagtatttaacatgaacagtttggcaaataagggaaatggtgaaaacaaaatcaatatatataacataaaatcggacaaggtcaaaatatgcttggtgttgaccatgtgctcagtagtgggaggttggaaattttttgcatgcgcattcaattaattccttttgcgtcaatgcttggactcgttgctaatttgctattgatgaactggttagaaaagaaaagaagcaggatttaatttttactatagcattcttgtatacttattaaatggaaaagtattgaatatttttttatatacttaagacattaatgcgcatttatttaatttctatcaaattctttgtttagaaaatattgagggaattgataaaaatatatagcagtattaatttttcatctcatacttctgcttcttttttttttttttactgaattacatacttctgctatttatttnnnnnnnnnnnnnnnnnnnnnnnnnnnnnnnnnnnnnnnnnnnnnnnnnnnnnnnnnnnnnnnnnnnnnnnnnnnnnnnnnnnnnnnnnnnnnnnnnnnnnnnnnnnnnnnnnnnnnnnnnnnnnnnnnnnnnnnnttttttttttttttttactgaattacatacttctgctatttatttttatataactaaagtataaatattaatgaactgcataatgatggcttgacaaagtacttaaatattctccagcttagggatctttttttttcatttttgtctttttgagaagatcaatatgcaaattctcgcgaatattattatatatatcatcatttatgcaagaggacgtatatatatttacatatgttttttcaattattaaaatgttcagttttggaaaaccttgctactatgatctcttttcttttctcatagccttggacagttggactactatcatccacctcgggtaaactaactggttgacatttgaatttctagtttgcctcgtttggtaaaaatattggttctcatttttgttattcaataatttcgtaaaatataatgccttactcatttgcgtggtgtgataatatctaccaaacttataaagttatttttaactattttttttatttaaatgagagaataaaaaaaaattcacaattataattttaataaattatattatatataaagacataatatttggttattttgttgtaccttctttaagagtttggtgatatattgttttcgaaagcaacagattttggggtaattatatagtttttttgtgtgtgatatttttacttcttaaaaataatatattataatttaattaaatnnnnnnnnnnaatttctagtttgcctcgtttggtaaaaatattggttctcatttttgttattcaataatttcataatatataatgccttactcatttgcataagatatttacttcatgcattaattaaaatgatttattttgtattcatgtttttttacaggaattttgctttcatgttaaaatatacatgtttgtttgtttatgtgtggtgtgataatatctaccaaacttataaacttatttttaactatttttttatttaaatgcgagaatagaaataaattcacaattataattttaataatttatattatatataaagacataatatttggttattttgttgaaccttctttaagagtttagtgatatattgttttcgaaagcaacagattttgtggtaattatttagtttttttgtgtgtgatatttttacttcttaaaaataatatattataatttaattaaataaacatatatttttaaaatttgaaattatttacttttcatttttaattaatttttaaataacattgttttgaaaaaataattaatcattttataattttaaacatttaactgaaaaatattagaatttcattataaaattaaaaataaaaagtaaataataataatagtaaaggaagaattctaatgaaataatgacgattaaatgagaaaaaaaaataagttaggaatagacatattttatattatactttctataaattttattattgatattgtacacacacaaaatttatctattccagaccatagaagacggtttttcataaattatttgatttaattcacaaaaaaatatgagtaatttttttattatatcaatttaaagttaaaaaataaattcagataacattattaaaaattaaaagtaaaggtaaatcataacaaaaacatagaaagtacaatcaacctagtaatcttttatagcagatatcgatcctcatagtggataaatcgaattacaaatagccaagtacgttgctatgacagaaatgtgagatcagcctaatgctaattcctaggggtaatgtgaacggagtttatttttttgggtgcatgatgtgaactgaatcctttgacaaacctaagcgtcttcgttggtttttaaaatataagttttatcaagaatttattttcctgaaacaatgtgtaaagcttttgataaatttgtttctcaaaaaatttaaattttagtttccaaataaaaaaagtataataaattcttctatcaattaacttttattcacta

(The sequence listing continues in the following parts.)

1. A vector comprising an R-gene encoding a CNL or TNLW R gene motif wherein said R-gene is derived from Glycine tomentella wherein the Glycine tomentalle may optionally be any one of accession lines PI441001, PI483224, PI583970, PI446958, PI499939, PI505220, PI499933, PI441008, PI505256 or PI446961.

2. A vector comprising an R-gene operably linked to a promoter wherein the R-gene is a nucleotide sequence having anywhere between 70%-100% sequence identity to any one of SEQ ID NOs: 6, 9, 12, 15, 18, 21, 24, 27 or 30.

3. A vector comprising an R-gene operably linked to a promoter wherein the R-gene encodes a protein having at least 90% sequence identity to any one of SEQ ID NOs: 42, 43, 44, 45, 46, 47, 48, 49 or 50.

4. The vector of claim 2, wherein the promoter comprises any one of SEQ ID NOs: 7, 10, 13, 16, 19, 22, 25, 28, or 31.

5. A plant cell and/or plant comprising the vector of claim 1.

6. The plant cell of claim 5, wherein the plant cell and/or plant is soybean.

7. A method of preparing a soybean pathogen resistant plant comprising the steps of:
a. contacting a recipient plant cell with the vector of claim 1, wherein said vector is incorporated into the genome of the recipient plant cell;
b. regenerating the recipient plant cell into a plant; and
c. assaying the plant for resistance to a soybean pathogen.

8. The method of claim 7, wherein the vector comprises a nucleotide sequence that encodes a protein sequence selected from the group consisting of SEQ ID NOs: 42, 43, 44, 45, 46, 47, 48, 49 or 50.

9. The method of claim 7, wherein the vector comprises a polynucleotide sequence selected from the group consisting of: SEQ ID NOs: 6, 9, 12, 15, 18, 21, 24, 27 or 30.

10. A soybean pathogen resistant plant obtained by the method of claim 7.

11. An elite soybean plant comprising a protein sequence selected from the group consisting of: SEQ ID NOs: 42, 43, 44, 45, 46, 47, 48, 49 or 50.

12. The soybean plant of claim 11 wherein the selected sequence was introduce transgenically.

13. The elite soybean plant of claim 11, wherein the soybean plant has increased resistance to any one of the following: soy cyst nematode, bacterial pustule, root knot nematode, frog eye leaf spot, phytopthora, brown stem rot, nematode, Asian Soybean Rust, smut, Golovinomyces cichoracearum, Erysiphe cichoracearum, Blumeria graminis, Podosphaera xanthii, Sphaerotheca fuliginea, Pythium ultimum, Uncinula necator, Mycosphaerella pinodes, Magnaporthe grisea, Bipolaris oryzae, Magnaporthe grisea, Rhizoctonia solani, Phytophthora sojae, Schizaphis graminum, Bemisia tabaci, Rhopalosiphum maidis, Deroceras reticulatum, Diatraea saccharalis, Schizaphis graminum or Myzus persicae.

14. The elite soybean plant of claim 11 wherein the plant has resistance to Asian Soybean Rust.

15. A method of controlling Asian Soybean Rust in a field comprising the step of planting a seed from the plant described in claim 14.

16. A nucleic acid molecule comprising a polynucleotide operably linked to a heterologous promoter, wherein said polynucleotide encodes a polypeptide selected from the group consisting of:
a. SEQ ID NOs: 42, 43, 44, 45, 46, 47, 48, 49 or 50; or
b. a polypeptide having at least 90% identity to at least one polypeptide of (a).

17. The nucleic acid molecule of claim 16, wherein the heterologous promoter is a plant expressible promoter.

18. A vector comprising the nucleic acid molecule according to claim 16.

19. A transgenic cell comprising the nucleic acid according to claim 16.

20. The transgenic cell of claim 19, wherein the cell is a transgenic plant cell.

21. The transgenic plant cell according to claim 20 wherein the plant cell is:
a. a monocot cell, optionally a barley cell, a maize cell, an oat cell, a rice cell, a sorghum cell, a sugarcane cell or a wheat cell; or
b. a dicot cell, optionally a soybean cell, a sunflower cell, a tomato cell, a cole crop cell, a cotton cell, a sugar beet cell or a tobacco cell.

22. The transgenic plant cell according to claim 21, wherein the plant cell is a soybean cell.

23. A transgenic plant comprising the transgenic plant cell according to claim 21.

24. A transgenic seed of the transgenic plant according to claim 23.

25. A harvested product derived from the transgenic seed according the claim 24.

26. A processed product derived from the harvested product according to claim 25, wherein the processed product is a flour, a meal, an oil, a starch, or a product derived from any of the foregoing.

27. A method of producing a transgenic plant with increased resistance to a soybean pathogen and comprising an R-gene, the method comprising introducing into a plant the nucleic acid molecule of claim 16, wherein the R-gene is expressed in the plant, thereby producing a transgenic plant with increased resistance to a soybean pathogen.

28. The method according to claim 27, wherein the introducing step comprises:
i. transforming a plant cell with the nucleic acid molecule and regenerating a transgenic plant; or
ii. crossing a first plant comprising the nucleic acid molecule with a second plant.

29. (canceled)

30. (canceled)
